(19) United States
(12) Patent Application Publication
(10) Pub. No.: US 2018/0066262 A1
(43) Pub. Date: Mar. 8, 2018

(54) OLIGONUCLEOTIDE PROBES AND USES THEREOF

(71) Applicant: Caris Science, Inc., Irving, TX (US)

(72) Inventors: Valeriy DOMENYUK, Phoenix, AZ (US); Adam STARK, Surprise, AZ (US); Nianqing XIAO, Rockville, MD (US); Zhenyu ZHONG, Peoria, AZ (US); Mark MIGLARESE, Phoenix, AZ (US); David SPETZLER, Paradise Valley, AZ (US)

(21) Appl. No.: 15/557,010

(22) PCT Filed: Mar. 9, 2016
(86) PCT No.: PCT/US16/21632

§ 371 Date: Sep. 8, 2017

Related U.S. Application Data
(60) Provisional application No. 62/130,514, filed on Mar. 9, 2015.
(60) Provisional application No. 62/149,663, filed on Apr. 20, 2015.
(60) Provisional application No. 62/161,181, filed on May 13, 2015.
(60) Provisional application No. 62/167,406, filed on May 28, 2015.
(60) Provisional application No. 62/169,383, filed on Jun. 1, 2015.
(60) Provisional application No. 62/220,652, filed on Sep. 18, 2015.
(60) Provisional application No. 62/239,206, filed on Oct. 8, 2015.
(60) Provisional application No. 62/269,671, filed on Dec. 18, 2015.
(60) Provisional application No. 62/305,536, filed on Mar. 9, 2016.

(51) Int. Cl. C12N 15/115; C12Q 1/68; C40B 20/08; G01N 33/50

(52) U.S. Cl. CPC C12N 15/115; C12Q 1/6886; C40B 20/08; C12Q 2600/156; C12N 2310/16; C12N 2310/3519; G01N 33/5005

(57) ABSTRACT

Methods and compositions are provided for oligonucleotide probes and oligonucleotide probe libraries that recognize targets of interest. The targets include circulating biomarkers such as microvesicles, including those derived from various diseases.

### CROSS REFERENCE

[0001] This application claims the benefit of U.S. Provisional Patent Application Nos. 62/130,514, filed Mar. 9, 2015; 62/149,663, filed Apr. 20, 2015; 62/161,181, filed May 13, 2015; 62/167,406, filed May 28, 2015; 62/169,383, filed Jun. 1, 2015; 62/200,652, filed Sep. 18, 2015; 62/239,206, filed Oct. 8, 2015; 62/269,671, filed Dec. 18, 2015; and 62/305,536, filed Mar. 9, 2016; all of which applications are incorporated herein by reference in their entirety.

### SEQUENCE LISTING SUBMITTED VIA EFS-WEB

[0002] The entire content of the following electronic submission of the sequence listing via the USPTO EFS-WEB server, as authorized and set forth in MPEP § 1730 II.B.2(a), is incorporated herein by reference in its entirety for all purposes. The sequence listing is within the electronically filed text file that is identified as follows:

[0003] File Name: 37901830601SeqList.txt

[0004] Date of Creation: Mar. 9, 2016

[0005] Size (bytes): 799,727 bytes

### BACKGROUND OF THE INVENTION

[0006] The invention relates generally to the field of aptamers capable of binding to microvesicle surface antigens, which are useful as therapeutics in and diagnostics of cancer and/or other diseases or disorders in which microvesicles implicated. The invention further relates to materials and methods for the administration of aptamers capable of binding to microvesicles. The microvesicles may be derived from cells indicative of cancer, including without limitation a breast cancer.

[0007] Aptamers are oligomeric nucleic acid molecules having specific binding affinity to molecules, which may be through interactions other than classic Watson-Crick base pairing. Unless otherwise specified, an “aptamer” as the term is used herein can refer to nucleic acid molecules that can be used to characterize a phenotype, regardless of manner of target recognition. Unless other specified, the terms “aptamer,” “oligonucleotide,” “polynucleotide,” or the like may be used interchangeably herein.

[0008] Aptamers, like peptides generated by phage display or monoclonal antibodies (“mAbs”), are capable of specifically binding to selected targets and modulating the target's activity, e.g., through binding aptamers may block their target's ability to function. Created by an in vitro selection process from pools of random sequence oligonucleotides, aptamers have been generated for over 100 proteins including growth factors, transcription factors, enzymes, immunoglobulins, and receptors. A typical aptamer is 10-15 kDa in size (30-45 nucleotides), binds its target with sub-nanomolar affinity, and discriminates against closely related targets (e.g., aptamers will typically not bind other proteins from the same gene family). A series of structural studies have shown that aptamers are capable of using the same types of binding interactions (e.g., hydrogen bonding, electrostatic complementarity, hydrophobic contacts, steric exclusion) that drive affinity and specificity in antibody-antigen complexes.

[0009] Aptamers have a number of desirable characteristics for use as therapeutics and diagnostics including high specificity and affinity, biological efficacy, and excellent pharmacokinetic properties. In addition, they offer specific competitive advantages over antibodies and other protein biologics, for example:

[0010] Speed and control. Aptamers are produced by an entirely in vitro process, allowing for the rapid generation of initial leads, including therapeutic leads. In vitro selection allows the specificity and affinity of the aptamer to be tightly controlled and allows the generation of leads, including leads against both toxic and non-immunogenic targets.

[0011] Toxicity and Immunogenicity. Aptamers as a class have demonstrated little or no toxicity or immunogenicity. In chronic dosing of rats or woodchucks with high levels of aptamer (10 mg/kg daily for 90 days), no toxicity is observed by any clinical, cellular, or biochemical measure. Whereas the efficacy of many monoclonal antibodies can be severely limited by immune response to antibodies themselves, it is extremely difficult to elicit antibodies to aptamers most likely because aptamers cannot be presented by T-cells via the MHC and the immune response is generally trained not to recognize nucleic acid fragments.

[0012] Administration. Whereas most currently approved antibody therapeutics are administered by intravenous infusion (typically over 2-4 hours), aptamers can be administered by subcutaneous injection (aptamer bioavailability via subcutaneous administration is >80% in monkey studies (Tucker et al., J. Chromatography B. 732: 203-212, 1999)). This difference is primarily due to the comparatively low solubility and thus large volumes necessary for most therapeutic mAbs. With good solubility (>150 mg/mL) and comparatively low molecular weight (aptamer: 10-50 kDa; antibody: 150 kDa), a weekly dose of aptamer may be delivered by injection in a volume of less than 0.5 mL. In addition, the small size of aptamers allows them to penetrate into areas of conformational constrictions that do not allow for antibodies or antibody fragments to penetrate, presenting yet another advantage of aptamer-based therapeutics or prophylaxis.

[0013] Scalability and cost. Aptamers are chemically synthesized and are readily scaled as needed to meet production demand for diagnostic or therapeutic applications. Whereas difficulties in scaling production are currently limiting the availability of some biologics and the capital cost of a large-scale protein production plant is enormous, a single large-scale oligonucleotide synthesizer can produce upwards of 100 kg/year and requires a relatively modest initial investment. The current cost of goods for aptamer synthesis at the kilogram scale is estimated at $100/g, comparable to that for highly optimized antibodies.

[0014] Stability. Aptamers are chemically robust. They are intrinsically adapted to regain activity following exposure to factors such as heat and denaturants and can be stored for extended periods (>1 yr) at room temperature as lyophilized powders.

### INCORPORATION BY REFERENCE

[0015] All publications, patents and patent applications mentioned in this specification are herein incorporated by reference to the same extent as if each individual publication, patent or patent application was specifically and individually indicated to be incorporated by reference.

### SUMMARY OF THE INVENTION

[0016] Compositions and methods of the invention provide aptamers that bind biomarkers of interest such as microvesicle surface antigens or functional fragments of microvesicle surface antigens. In various embodiments, oligonucleotide probes of the invention are used in diagnostic, prognostic or theranostic processes to screen a biological sample for the presence or levels of biomarkers, including without limitation microvesicle surface antigens, determined to provide a relevant readout. The diagnosis may be related to a cancer, e.g., a breast cancer. In other embodiments, oligonucleotide probes of the invention are chemically modified or composed in a pharmaceutical composition for therapeutic applications.

[0017] In an aspect, the invention provides an oligonucleotide comprising a sequence according to any one of SEQ ID NOs 137-969 and 1072-4150. In a related aspect, the invention provides an oligonucleotide comprising a sequence according to any one of the SEQ ID NOs in Table 40. In another related aspect, the invention provides an oligonucleotide comprising a sequence according to any one of the SEQ ID NOs in the row “2000v1” in Table 43. In still another related aspect, the invention provides an oligonucleotide comprising a sequence according to any one of the SEQ ID NOs in the row “2000v2” in Table 43. In yet another related aspect, the invention provides an oligonucleotide comprising a sequence according to any one of the SEQ ID NOs in the row “Common” in Table 43.

[0018] The oligonucleotides of the invention can comprise flanking regions for various purposes, including without limitation amplification, capture, conjugation or spacing. For example, the invention provides an oligonucleotide comprising a sequence according to any one of the SEQ ID NOs above and further having a 5′ region with sequence 5′-CTAGCATGACTGCAGTACGT (SEQ ID NO. 131) and/or a 3′ region with sequence 5′-CTGTCTCTTATACACATCTGACGCTGCCGACGA (SEQ ID NO. 132).

[0019] The invention further provides oligonucleotides homologous to the SEQ ID NOs above. For example, the invention provides an oligonucleotide comprising a nucleic acid sequence or a portion thereof that is at least 50, 55, 60, 65, 70, 75, 80, 85, 90, 95, 96, 97, 98, 99 or 100 percent homologous to an oligonucleotide sequence of any one of the SEQ ID NOs above. The homologous sequences may comprise similar properties to the listed sequences, such as similar binding properties.

[0020] In an aspect, the invention provides a plurality of oligonucleotides comprising at least 1, 2, 3, 4, 5, 6, 7, 8, 9, 10, 11, 12, 13, 14, 15, 16, 17, 18, 19, 20, 25, 30, 40, 45, 50, 55, 60, 65, 70, 75, 80, 85, 90, 95, 100, 125, 150, 175, 200, 300, 400, 500, 600, 700, 800, 900, 1000, 2000, 3000, 4000, 5000, 6000, 7000, 8000, 9000, or at least 10000 different oligonucleotide sequences as described in the paragraphs above. For example, the invention provides a plurality of oligonucleotides comprising member sequences having at least 1, 2, 3, 4, 5, 6, 7, 8, 9, 10, 11, 12, 13, 14, 15, 16, 17, 18, 19, 20, 25, 30, 40, 45, 50, 55, 60, 65, 70, 75, 80, 85, 90, 95, 100, 125, 150, 175, 200, 300, 400, 500, 600, 700, 800, 900, 1000, 1500, 2000, 2500, 3000, 3500, 4000, or all variable regions according to SEQ ID NOs 137-969 and 1072-4150.

[0021] The plurality of oligonucleotides can comprise at least 1, 2, 3, 4, 5, 6, 7, 8, 9, 10, 11, 12, 13, 14, 15, 16, 17, 18, 19, 20, 25, 30, 40, 45, 50, 55, 60, 65, 70, 75, or all SEQ ID NOs listed in Table 40. In an embodiment, the plurality of oligonucleotides comprises at least the first 1, 2, 3, 4, 5, 6, 7, 8, 9, 10, 11, 12, 13, 14, 15, 16, 17, 18, 19, 20, 25, 30, 40, 45, 50, 55, 60, 65, 70, 75, or SEQ ID NOs listed in Table 40.

[0022] The plurality of oligonucleotides can also comprise at least 1, 2, 3, 4, 5, 6, 7, 8, 9, 10, 11, 12, 13, 14, 15, 16, 17, 18, 19, 20, 25, 30, 40, 45, 50, 55, 60, 65, 70, 75, 80, 85, 90, 95, 100, 125, 150, 175, 200, 225, 250, 275, 300, or all SEQ ID NOs listed in row “2000v1” of Table 43. In an embodiment, the plurality of oligonucleotides comprises at least the first 1, 2, 3, 4, 5, 6, 7, 8, 9, 10, 11, 12, 13, 14, 15, 16, 17, 18, 19, 20, 25, 30, 40, 45, 50, 55, 60, 65, 70, 75, 80, 85, 90, 95, 100, 125, 150, 175, 200, 225, 250, 275, 300, or all SEQ ID NOs listed in row “2000v1” of Table 43.

[0023] The plurality of oligonucleotides can comprise at least 1, 2, 3, 4, 5, 6, 7, 8, 9, 10, 11, 12, 13, 14, 15, 16, 17, 18, 19, 20, 25, 30, 40, 45, 50, 55, 60, 65, 70, 75, 80, 85, 90, 95, 100, 105, 110, 115, 120, 125, 130, 135, 140, 145 or all SEQ ID NOs listed in row “2000v2” of Table 43. In an embodiment, the plurality of oligonucleotides comprises at least the first 1, 2, 3, 4, 5, 6, 7, 8, 9, 10, 11, 12, 13, 14, 15, 16, 17, 18, 19, 20, 25, 30, 40, 45, 50, 55, 60, 65, 70, 75, 80, 85, 90, 95, 100, 105, 110, 115, 120, 125, 130, 135, 140, 145 or all SEQ ID NOs listed in row “2000v2” of Table 43.

[0024] The plurality of oligonucleotides can also comprise at least 1, 2, 3, 4, 5, 6, 7, 8, 9, 10, 11, 12, 13, 14, 15, 16, 17 or all variable regions listed in row “Common” of Table 43. In an embodiment, the plurality of oligonucleotides comprises at least the first 1, 2, 3, 4, 5, 6, 7, 8, 9, 10, 11, 12, 13, 14, 15, 16, 17 or all SEQ ID NOs listed in row “Common” of Table 43.

[0025] The oligonucleotide or at least one member of the plurality of oligonucleotides can have least one functional modification selected from the group consisting of DNA, RNA, biotinylation, a non-naturally occurring nucleotides, a deletion, an insertion, an addition, and a chemical modification. Such modifications may provide additional or altered functions to the oligonucleotides, including without limitation capture, detection, stability, or binding properties.

[0026] In an aspect, the invention provides a method of characterizing a phenotype in a sample comprising: (a) contacting the sample with at least one oligonucleotide or plurality of oligonucleotides provided by the invention (see above); and (b) identifying a presence or level of a complex formed between the at least one oligonucleotide or plurality of oligonucleotides and the sample, wherein the presence or level is used to characterize the phenotype. Any useful technique for identifying can be used according to the invention. In various embodiments, the identifying comprises sequencing, amplification, hybridization, gel electrophoresis or chromatography. In an embodiment, identifying by hybridization comprises contacting the sample with at least one labeled probe that is configured to hybridize with at least one oligonucleotide. The at least one labeled probe can be directly or indirectly attached to a label. Any useful label can be used, including without limitation a fluorescent or magnetic label. In another embodiment, identifying by sequencing comprises next generation sequencing, dye termination sequencing, and/or pyrosequencing.

[0027] In another aspect, the invention provides a method of detecting at least one oligonucleotide in a sample, comprising: (a) providing the at least one oligonucleotide comprising a capture moiety; (b) contacting the sample with the at least one oligonucleotide provided in (a); (c) capturing the at least one oligonucleotide that formed a complex with a component in the sample in (b); and (d) identifying a presence or level of the at least one oligonucleotide captured in (c), wherein optionally the presence or level is used to characterize a phenotype. See, e.g., Example 33 and FIGS. 17A-E. The at least one oligonucleotide may be captured to a substrate, including without limitation a bead or planar substrate. The capture moiety can be any useful capture moiety, including without limitation a biotin moiety. The capture moiety can be cleavable, e.g., photocleavable or chemically cleavable. In an embodiment, the at least one oligonucleotide is captured to a substrate coupled to avidin or streptavidin. Such configuration is particularly useful when the capture moiety comprises a biotin moiety. In some embodiments, the captured at least one oligonucleotide is released from the substrate by irradiation prior to the identifying. Any useful irradiation, e.g., ultra violet (UV) light may be used. Any useful technique for identifying can be used according to the invention. In various embodiments, the identifying comprises sequencing, amplification, hybridization, gel electrophoresis or chromatography. In an embodiment, identifying by hybridization comprises contacting the sample with at least one labeled probe that is configured to hybridize with at least one oligonucleotide. The at least one labeled probe can be directly or indirectly attached to a label. Any useful label can be used, including without limitation a fluorescent or magnetic label. In another embodiment, identifying by sequencing comprises next generation sequencing, dye termination sequencing, and/or pyrosequencing. The at least one oligonucleotide can be an oligonucleotide or plurality of oligonucleotides provided by the invention. See e.g., the oligonucleotides and plurality of oligonucleotides described above.

[0028] In the methods of the invention, the complex formed between the at least one oligonucleotide or the plurality of oligonucleotides and the sample can be a complex formed between a microvesicle population in the sample and the at least one oligonucleotide or plurality of oligonucleotides. The microvesicle population can be isolated in whole or in part from other constituents in the sample before of after the contacting. In embodiments, the isolating uses affinity purification, filtration, polymer precipitation, PEG precipitation, ultracentrifugation, a molecular crowding reagent, affinity isolation, affinity selection, or any combination thereof.

[0029] In the methods of the invention, the phenotype can be any detectable phenotype. In some embodiments, the phenotype comprises a disease or disorder. In such cases, the characterizing can be a diagnosis, prognosis and/or theranosis for the disease or disorder. The theranosis can be any type of therapy-related such as described herein. The theranosis includes without limitation predicting a treatment efficacy or lack thereof, or monitoring a treatment efficacy.

[0030] The characterizing step of the methods of the invention may entail comparing the presence or level to a reference. Any useful reference can be used. In an embodiment wherein the phenotype comprises a disease or disorder, the reference can be the presence or level determined in a sample from an individual without a disease or disorder, or from an individual with a different state of the disease or disorder. In some embodiments, the comparison to the reference of at least one oligonucleotide comprising a sequence having a SEQ ID NO provided above indicates that the sample comprises a cancer sample or a non-cancer/normal sample.

[0031] In the methods of the invention, the sample can be any useful sample, including without limitation a bodily fluid, tissue sample or cell culture. Likewise, the can be any useful bodily fluid, including without limitation peripheral blood, sera, plasma, ascites, urine, cerebrospinal fluid (CSF), sputum, saliva, bone marrow, synovial fluid, aqueous humor, amniotic fluid, cerumen, breast milk, broncheoalveolar lavage fluid, semen, prostatic fluid, cowper's fluid or pre-ejaculatory fluid, female ejaculate, sweat, fecal matter, hair oil, tears, cyst fluid, pleural and peritoneal fluid, pericardial fluid, lymph, chyme, chyle, bile, interstitial fluid, menses, pus, sebum, vomit, vaginal secretions, mucosal secretion, stool water, pancreatic juice, lavage fluids from sinus cavities, bronchopulmonary aspirates, blastocyl cavity fluid, or umbilical cord blood. Plasma and serum may be preferred for some applications.

[0032] In some embodiments, the sample is from a subject suspected of having or being predisposed to a disease or disorder. As noted, the methods can be performed to provide a diagnosis, prognosis, or theranosis for the disease or disorder. Any desired disease or order can be assessed. In various embodiments, the disease or disorder comprises a cancer, a premalignant condition, an inflammatory disease, an immune disease, an autoimmune disease or disorder, a cardiovascular disease or disorder, neurological disease or disorder, infectious disease or pain. In an embodiment, the cancer comprises an acute lymphoblastic leukemia; acute myeloid leukemia; adrenocortical carcinoma; AIDS-related cancers; AIDS-related lymphoma; anal cancer; appendix cancer; astrocytomas; atypical teratoid/rhabdoid tumor; basal cell carcinoma; bladder cancer; brain stem glioma; brain tumor (including brain stem glioma, central nervous system atypical teratoid/rhabdoid tumor, central nervous system embryonal tumors, astrocytomas, craniopharyngioma, ependymoblastoma, ependymoma, medulloblastoma, medulloepithelioma, pineal parenchymal tumors of intermediate differentiation, supratentorial primitive neuroectodermal tumors and pineoblastoma); breast cancer; bronchial tumors; Burkitt lymphoma; cancer of unknown primary site; carcinoid tumor; carcinoma of unknown primary site; central nervous system atypical teratoid/rhabdoid tumor; central nervous system embryonal tumors; cervical cancer; childhood cancers; chordoma; chronic lymphocytic leukemia; chronic myelogenous leukemia; chronic myeloproliferative disorders; colon cancer; colorectal cancer; craniopharyngioma; cutaneous T-cell lymphoma; endocrine pancreas islet cell tumors; endometrial cancer; ependymoblastoma; ependymoma; esophageal cancer; esthesioneuroblastoma; Ewing sarcoma; extracranial germ cell tumor; extragonadal germ cell tumor; extrahepatic bile duct cancer; gallbladder cancer; gastric (stomach) cancer; gastrointestinal carcinoid tumor; gastrointestinal stromal cell tumor; gastrointestinal stromal tumor (GIST); gestational trophoblastic tumor; glioma; hairy cell leukemia; head and neck cancer; heart cancer; Hodgkin lymphoma; hypopharyngeal cancer; intraocular melanoma; islet cell tumors; Kaposi sarcoma; kidney cancer; Langerhans cell histiocytosis; laryngeal cancer; lip cancer; liver cancer; lung cancer; malignant fibrous histiocytoma bone cancer; medulloblastoma; medulloepithelioma; melanoma; Merkel cell carcinoma; Merkel cell skin carcinoma; mesothelioma; metastatic squamous neck cancer with occult primary; mouth cancer; multiple endocrine neoplasia syndromes; multiple myeloma; multiple myeloma/plasma cell neoplasm; mycosis fungoides; myelodysplastic syndromes; myeloproliferative neoplasms; nasal cavity cancer; nasopharyngeal cancer; neuroblastoma; Non-Hodgkin lymphoma; nonmelanoma skin cancer; non-small cell lung cancer; oral cancer; oral cavity cancer; oropharyngeal cancer; osteosarcoma; other brain and spinal cord tumors; ovarian cancer; ovarian epithelial cancer; ovarian germ cell tumor; ovarian low malignant potential tumor; pancreatic cancer; papillomatosis; paranasal sinus cancer; parathyroid cancer; pelvic cancer; penile cancer; pharyngeal cancer; pineal parenchymal tumors of intermediate differentiation; pineoblastoma; pituitary tumor; plasma cell neoplasm/multiple myeloma; pleuropulmonary blastoma; primary central nervous system (CNS) lymphoma; primary hepatocellular liver cancer; prostate cancer; rectal cancer; renal cancer; renal cell (kidney) cancer; renal cell cancer; respiratory tract cancer; retinoblastoma; rhabdomyosarcoma; salivary gland cancer; Sezary syndrome; small cell lung cancer; small intestine cancer; soft tissue sarcoma; squamous cell carcinoma; squamous neck cancer; stomach (gastric) cancer; supratentorial primitive neuroectodermal tumors; T-cell lymphoma; testicular cancer; throat cancer; thymic carcinoma; thymoma; thyroid cancer; transitional cell cancer; transitional cell cancer of the renal pelvis and ureter; trophoblastic tumor; ureter cancer; urethral cancer; uterine cancer; uterine sarcoma; vaginal cancer; vulvar cancer; Waldenstrom macroglobulinemia; or Wilm's tumor. The premalignant condition can be Barrett's Esophagus. The autoimmune disease can be inflammatory bowel disease (IBD), Crohn's disease (CD), ulcerative colitis (UC), pelvic inflammation, vasculitis, psoriasis, diabetes, autoimmune hepatitis, multiple sclerosis, myasthenia gravis, Type I diabetes, rheumatoid arthritis, psoriasis, systemic lupus erythematosis (SLE), Hashimoto's Thyroiditis, Grave's disease, Ankylosing Spondylitis Sjogrens Disease, CREST syndrome, Scleroderma, Rheumatic Disease, organ rejection, Primary Sclerosing Cholangitis, or sepsis. The cardiovascular disease can be atherosclerosis, congestive heart failure, vulnerable plaque, stroke, ischemia, high blood pressure, stenosis, vessel occlusion or a thrombotic event. The neurological disease can be Multiple Sclerosis (MS), Parkinson's Disease (PD), Alzheimer's Disease (AD), schizophrenia, bipolar disorder, depression, autism, Prion Disease, Pick's disease, dementia, Huntington disease (HD), Down syndrome, cerebrovascular disease, Rasmussen's encephalitis, viral meningitis, neurospsychiatric systemic lupus erythematosus (NPSLE), amyotrophic lateral sclerosis, Creutzfeldt-Jacob disease, Gerstmann-Straussler-Scheinker disease, transmissible spongiform encephalopathy, ischemic reperfusion damage (e.g. stroke), brain trauma, microbial infection, or chronic fatigue syndrome. The pain can be fibromyalgia, chronic neuropathic pain, or peripheral neuropathic pain. The infectious disease can be a bacterial infection, viral infection, yeast infection, Whipple's Disease, Prion Disease, cirrhosis, methicillin-resistant staphylococcus aureus, HIV, HCV, hepatitis, syphilis, meningitis, malaria, tuberculosis, influenza.

[0033] As further described herein, the invention provides a kit comprising a reagent for carrying out the method. Similarly, the invention provides for the use of a reagent for carrying out the method. The reagent can be any useful reagent for carrying out the method. For example, the reagent can be an oligonucleotide or plurality of oligonucleotides and/or a composition as described above.

[0034] In an embodiment, the invention provides a nucleic acid molecule comprising a 5′ leader region which is 5′ of a variable region, which is 5′ of a tail region, wherein the leader region comprises a lengthener region, a terminator region and a forward primer region, and the tail region comprises a reverse primer region. The nucleic acid molecule may be used for asymmetric or unequal length PCR applications as desired. See, e.g., Example 34 and FIGS. 18A-C. The lengthener region can be any desired length. In some embodiments, the lengthener region comprises at least 10, 11, 12, 13, 14, 15, 16, 17, 18, 19, 20, 21, 22, 23, 24, 25, 26, 27, 28, 29, 30, 31, 32, 33, 34, 35, 36, 37, 38, 39, 30, 41, 42, 43, 44, 45, 46, 47, 48, 49, or 50 nucleotides. The lengthener region may comprise a poly-A sequence. Similarly, the terminator region can be any desired length. In some embodiments, the terminator region comprises at least 3, 4, 5, 6, 7, 8, 9, 10, 11, 12, 13, 14, 15, 16, 17, 18, 19, 20, 21, 22, 23, 24, 25, 26, 27, 28, 29, 30, 31, 32, 33, 34, 35, 36, 37, 38, 39, 30, 41, 42, 43, 44, 45, 46, 47, 48, 49, or 50 nucleotides. The terminator region may comprise a non-nucleotide terminator. For example, the non-nucleotide terminator can be a polymer such as triethylene glycol or the like. The forward primer region can be any desired length. In some embodiments, the forward primer region comprises at least 10, 11, 12, 13, 14, 15, 16, 17, 18, 19, 20, 21, 22, 23, 24, 25, 26, 27, 28, 29, 30, 31, 32, 33, 34, 35, 36, 37, 38, 39, 30, 41, 42, 43, 44, 45, 46, 47, 48, 49, or 50 nucleotides. The variable region can be any desired length. In some embodiments, the variable region comprises at least 10, 11, 12, 13, 14, 15, 16, 17, 18, 19, 20, 21, 22, 23, 24, 25, 26, 27, 28, 29, 30, 31, 32, 33, 34, 35, 36, 37, 38, 39, 30, 41, 42, 43, 44, 45, 46, 47, 48, 49, or 50 nucleotides. In some embodiments, the variable region binds a target molecule or complex through non-Watson-Crick base pairing. For example, the variable region may act as an aptamer and bind proteins or other entities. Finally, the reverse primer region can be any desired length. In some embodiments, the reverse primer region comprises at least 10, 11, 12, 13, 14, 15, 16, 17, 18, 19, 20, 21, 22, 23, 24, 25, 26, 27, 28, 29, 30, 31, 32, 33, 34, 35, 36, 37, 38, 39, 30, 41, 42, 43, 44, 45, 46, 47, 48, 49, or 50 nucleotides.

[0035] In a related aspect, the invention provides a method of generating a single-stranded DNA (ssDNA) molecule comprising: a) providing a mixture comprising a nucleic acid molecule as described in the paragraph above, and forward and reverse primers configured to amplify the nucleic acid molecule from the forward primer region and reverse primer region, respectively; and b) performing asymmetric polymerase chain reaction (PCR) on the mixture in a) to favorably amplify the reverse strand of the nucleic acid molecule, wherein the forward and reverse primers in the mixture are at a ratio of at least about 1:5 (F/R) in favor of the reverse primers; thereby generating the ssDNA molecule. In an embodiment, the ratio is between about 1:20-1:50 (F/R) in favor of the reverse primers. For example, the ratio can be between about 1:37.5 (F/R) in favor of the reverse primers. The method may further comprise isolating the amplified reverse strand of the nucleic acid molecule on a native gel. The method may also further comprise: c) denaturing the amplified nucleic acid molecules from b); and d) isolating the denatured reverse strand of the nucleic acid molecules from c). In an embodiment, the denatured reverse strand of the nucleic acid molecules is isolated on a denaturing gel. The mixture in a) can comprise additional components as desired. For example, the mixture may further comprise at least one of an enrichment buffer, non-target molecules, proteins, microvesicles, and polyethyleve glycol.

[0036] In a related aspect, the invention provides a kit comprising a reagent for carrying out the methods herein. In still another related aspect, the invention provides for use of a reagent for carrying out the methods. In various embodiments, the reagent comprises at least one of a buffer, a nucleic acid molecule described above, and forward and/or reverse primers configured to amplify the nucleic acid molecule.

### BRIEF DESCRIPTION OF THE DRAWINGS

[0037] FIG. 1 illustrates a competitive assay selection strategy: the random pool of aptamer (the library) is incubated with the target protein, in this case, EpCAM. After washing and elution from the target, the eluted aptamers are again added to the target and allowed to bind. The antibody is then added to the reaction, competing with the aptamers at the epitope of the antibody. The aptamers displaced by the antibody are then collected.

[0038] FIGS. 2A-2F illustrate methods of assessing biomarkers such as microvesicle surface antigens. FIG. 2A is a schematic of a planar substrate coated with a capture agent, such as an aptamer or antibody, which captures vesicles expressing the target antigen of the capture agent. The capture agent may bind a protein expressed on the surface of vesicles shed from diseased cells (“disease vesicle”). The detection agent, which may also be an aptamer or antibody, carries a detectable label, here a fluorescent signal. The detection agent binds to the captured vesicle and provides a detectable signal via its fluorescent label. The detection agent can detect an antigen that is generally associated with vesicles, or is associated with a cell-of-origin or a disease, e.g., a cancer. FIG. 2B is a schematic of a particle bead conjugated with a capture agent, which captures vesicles expressing the target antigen of the capture agent. The capture agent may bind a protein expressed on the surface of vesicles shed from diseased cells (“disease vesicle”). The detection agent, which may also be an aptamer or antibody, carries a detectable label, here a fluorescent signal. The detection agent binds to the captured vesicle and provides a detectable signal via its fluorescent label. The detection agent can detect an antigen that is generally associated with vesicles, or is associated with a cell-of-origin or a disease, e.g., a cancer. FIG. 2C is an example of a screening scheme that can be performed by using different combinations of capture and detection agents to the indicated biomarkers. The biomarker combinations can be detected using assays as shown in FIGS. 2A-2B. FIGS. 2D-2E present illustrative schemes for capturing and detecting vesicles to characterize a phenotype. FIG. 2F presents illustrative schemes for assessing vesicle payload to characterize a phenotype.

[0039] FIGS. 3A-B illustrates a non-limiting example of an aptamer nucleotide sequence and its secondary structure. FIG. 3A illustrates a secondary structure of a 32-mer oligonucleotide, Aptamer 4, with sequence 5′-CCCCCCGAATCACATGACTTGGGCGGGGGTCG (SEQ ID NO. 1). In the figure, the sequence is shown with 6 thymine nucleotides added to the end, which can act as a spacer to attach a biotin molecule. This particular oligo has a high binding affinity to the target, EpCAM (see Table 5). Additional candidate EpCAM binders are identified by modeling the entire database of sequenced oligos to the secondary structure of this oligo. FIG. 3B illustrates another 32-mer oligo with sequence 5′-ACCGGATAGCGGTTGGAGGCGTGCTCCACTCG (SEQ ID NO. 2) that has a different secondary structure than the aptamer in FIG. 3A. This aptamer is also shown with a 6-thymine tail.

[0040] FIG. 4 illustrates a process for producing a target-specific set of aptamers using a cell subtraction method, wherein the target is a biomarker associated with a specific disease. In Step 1, a random pool of oligonucleotides are contacted with a biological sample from a normal patient. In Step 2, the oligos that did not bind in Step 1 are added to a biological sample isolated from diseased patients. The bound oligos from this step are then eluted, captured via their biotin linkage and then combined again with normal biological sample. The unbound oligos are then added again to disease-derived biological sample and isolated. This process can be repeated iteratively. The final eluted aptamers are tested against patient samples to measure the sensitivity and specificity of the set. Biological samples can include blood, including plasma or serum, or other components of the circulatory system, such as microvesicles.

[0041] FIG. 5 illustrates results from a binding assay showing the binding affinity of an exemplary aptamer (Aptamer ID BTX176881 (SEQ ID NO: 3)) to the target EpCAM protein at various target concentrations. The aptamer to be tested is fixed to a substrate using a biotin tail and is incubated with various concentrations of target (125, 250 and 500 nM). The test is performed on a surface plasmon resonance machine (SPR). The SPR machine detects association and disassociation of the aptamer and the target. Target is applied until the association and disassociation events are equal, resulting in a plateau of the curve. The equations describing the curve at each concentration can then be used to calculate the K_{D} of the aptamer (see Table 5).

[0042] FIGS. 6A-D illustrate the use of an anti-EpCAM aptamer (Aptamer 4; SEQ ID NO. 1) to detect a microvesicle population. Vesicles in patient plasma samples were captured using bead-conjugated antibodies to the indicated microvesicle surface antigens: A) EGFR; B) PBP; C) EpCAM; D) KLK2. Fluorescently labeled Aptamer 4 was used as a detector in the microbead assay. The figure shows average median fluorescence values (MFI values) for three cancer (C1-C3) and three normal samples (N1-N3) in each plot. In each plot, the samples from left to right are ordered as: C1, C2, C3, N1, N2, N3.

[0043] FIG. 7A illustrates the sequence of EPCAM aptamer CAR003 (SEQ ID NO. 4). FIG. 7B illustrates the optimal secondary structure of CAR003 with a minimum free energy (ΔG) of −30.00 kcal/mol. For purposes of illustration, the aptamer is shown as an RNA aptamer (SEQ ID NO. 5) corresponding to the DNA sequence in FIG. 7A. FIG. 7C illustrates aptamer pool purification. The figure comprises an FPLC chromatogram with all product and fractions assigned in pools after checking quality on gel. FIG. 7D illustrates a SYBR GOLD stained gel with different FPLC fractions of CAR003 aptamer after synthesis. Different fractions were combined in pools based on amount of un-finished chains in order high to low (pool 1-pool 3). The pools 1-3 correspond to those indicated in FIG. 7C. FIG. 7E-F illustrate binding of CAR003 to EPCAM protein in 25 mM HEPES with PBS-BN (FIG. 7E) or in 25 mM HEPES with 1 mM MgCl₂ (FIG. 7F). FIG. 7G illustrates CAR003 binding to EpCAM in the indicated salts with and without addition of bovine serum albumin (BSA). FIG. 7H illustrates the effect of denaturing on CAR003 binding to EPCAM protein. In each group of four bars, the aptamer is from left to right: Aptamer 4, CAR003 Pool 1, CAR003 Pool 2, CAR003 Pool 3. FIG. 7I illustrates titration of aptamers against EPCAM recombinant protein (constant input 5 μg). FIG. 7J illustrates a Western blot with CAR003 aptamer versus EPCAM his-tagged protein, BSA, and HSA (5 μg each). The gel was blocked 0.5% F127 and probed with ˜50 μg/ml CAR003 biotinylated aptamer, fraction 3. The blot was visualized with NeutrAvidin-HRP followed by SuperSignal West Femto Chemiluminescent Substrate.

[0044] FIGS. 8A-8D illustrates methods to attach microvesicles to a substrate. FIG. 8A illustrates direct conjugation of a carboxylated microsphere to a vesicle surface antigen. FIG. 8B illustrates anchoring of a microvesicle to a microsphere via a biotin functionalized lipid anchor. FIG. 8C illustrates antibody binding to a vesicle surface antigen, wherein the antibody is conjugated to a carboxylated microsphere. FIG. 8D illustrates aptamer binding to a vesicle surface antigen, wherein the aptamer is conjugated to a carboxylated microsphere.

[0045] FIG. 9 comprises a schematic for identifying a target of a selected aptamer, such as an aptamer selected by the process of the invention. The figure shows a binding agent 902, here an aptamer for purposes of illustration, tethered to a substrate 901. The binding agent 902 can be covalently attached to substrate 901. The binding agent 902 may also be non-covalently attached. For example, binding agent 902 can comprise a label which can be attracted to the substrate, such as a biotin group which can form a complex with an avidin/streptavidin molecule that is covalently attached to the substrate. The binding agent 902 binds to a surface antigen 903 of microvesicle 904. In the step signified by arrow (i), the microvesicle is disrupted while leaving the complex between the binding agent 902 and surface antigen 903 intact. Disrupted microvesicle 905 is removed, e.g., via washing or buffer exchange, in the step signified by arrow (ii). In the step signified by arrow (iii), the surface antigen 903 is released from the binding agent 902. The surface antigen 903 can be analyzed to determine its identity.

[0046] FIGS. 10A-10C illustrate binding of selected aptamers against microbeads conjugated to various input sample. The aptamers were selected from an aptamer library as binding to microbeads conjugated to breast cancer-derived microvesicles. Experimental details are in the Examples herein. Each plot shows a different aptamer. The Y-axis indicates level of binding. In each group of samples, binding of 9 purified aptamer candidates is shown. The input sample is indicated on the X axis from left to right as follows: 1) Cancer Exosome: aptamer binding to microbeads conjugated to microvesicles isolated from plasma samples from breast cancer patients; 2) Cancer Non-exosome: aptamer binding to microbeads conjugated to plasma samples from breast cancer patients after removal of microvesicles by ultracentrifugation; 3) Non-Cancer Exosome: aptamer binding to microbeads conjugated to microvesicles isolated from plasma samples from normal (i.e., non-breast cancer) patients; 4) Non-Cancer Non-Exosome: aptamer binding to microbeads conjugated to plasma samples from breast cancer patients after removal of microvesicles by ultracentrifugation.

[0047] FIGS. 11A-11B illustrate enriching a naïve aptamer library for aptamers that differentiate between breast cancer and non-cancer microvesicles in plasma samples.

[0048] FIGS. 12A-12G illustrate using an oligonucleotide probe library to differentiate cancer and non-cancer samples.

[0049] FIG. 13 shows protein targets of oligonucleotide probes run on a silver stained SDS-PAGE gel.

[0050] FIGS. 14A-G illustrate use of oligonucleotides that differentiate microvesicles in breast cancer plasma from normal controls.

[0051] FIG. 15 shows a heatmap of clusters of oligonucleotides enriched against aggressive versus non-aggressive breast cancer plams samples.

[0052] FIGS. 16A-B illustrate a model generated using a training (FIG. 16A) and test (FIG. 16B) set from a round of cross validation. The AUC for the test set was 0.803. Another exemplary round of cross-validation is shown in FIGS. 16C-D with training (FIG. 16C) and test (FIG. 16D) sets. The AUC for the test set was 0.678.

[0053] FIGS. 17A-E show a photo-cleavable Biotin mediated purification of an oligonucleotide library.

[0054] FIGS. 18A-C illustrate SUPRA (SsDNA by Unequal length PRimer Asymmetric PCR), a protocol for single stranded DNA (ssDNA) oligonucleotide library preparation.

[0055] FIGS. 19A-C illustrate use of aptamers in methods of characterizing a phenotype. FIG. 19A is a schematic 1900 showing an assay configuration that can be used to detect and/or quantify a target of interest. In the figure, capture aptamer 1902 is attached to substrate 1901. Target of interest 1903 is bound by capture aptamer 1902. Detection aptamer 1904 is also bound to target of interest 1903. Detection aptamer 1904 carries label 1905 which can be detected to identify target captured to substrate 1901 via capture aptamer 1902. FIG. 19B is a schematic 1910 showing use of an aptamer pool to characterize a phenotype. A pool of aptamers to a target of interest is provided 1911. The pool is contacted with a test sample to be characterized 1912. The mixture is washed to remove unbound aptamers. The remaining aptamers are disassociated and collected 1913. The collected aptamers are identified 1914 and the identity of the retained aptamers is used to characterize the phenotype 1915. FIG. 19C is a schematic 1920 showing an implementation of the method in FIG. 19B. A pool of aptamers identified as binding a microvesicle population is provided 1919. The input sample comprises microvesicles that are isolated from a test sample 1920. The pool is contacted with the isolated microvesicles to be characterized 1923. The mixture is washed to remove unbound aptamers and the remaining aptamers are disassociated and collected 1925. The collected aptamers are identified and the identity of the retained aptamers is used to characterize the phenotype 1926.

[0056] FIGS. 20A-I illustrate development and use of an oligonucleotide probe library to distinguish biological sample types.

[0057] FIGS. 21A-C illustrate enriching a naïve oligonucleotide library with balanced design for oligonucleotides that differentiate between breast cancer and non-cancer microvesicles derived from plasma samples.

[0058] FIGS. 22A-D shows characterization of breast cancer samples as cancer or non-cancer using two different but related oligonucleotide probe libraries.

### DETAILED DESCRIPTION OF THE INVENTION

[0059] The details of one or more embodiments of the invention are set forth in the accompanying description below. Although any methods and materials similar or equivalent to those described herein can be used in the practice or testing of the present invention, the preferred methods and materials are now described. Other features, objects, and advantages of the invention will be apparent from the description. In the specification, the singular forms also include the plural unless the context clearly dictates otherwise. Unless defined otherwise, all technical and scientific terms used herein have the same meaning as commonly understood by one of ordinary skill in the art to which this invention belongs. In the case of conflict, the present Specification will control.

[0060] Disclosed herein are compositions and methods that can be used to assess a biomarker profile, which can include a presence or level of one or more biomarkers. The compositions and methods of the invention comprise the use of oligonucleotide probes (aptamers) that bind microvesicle surface antigens or a functional fragment thereof. The antigens typically comprise proteins or polypeptides but can be any useful component displayed on a microvesicle surface including nucleic acids, lipids and/or carbohydrates. In general, the oligonucleotides disclosed are synthetic nucleic acid molecules, including DNA and RNA, and variations thereof. Unless otherwise specified, the oligonucleotide probes can be synthesized in DNA or RNA format or as hybrid molecules as desired. The methods disclosed comprise diagnostic processes and techniques using one or more aptamer of the invention, to determine the level or presence of relevant microvesicle surface antigens or a functional fragment thereof. Alternatively, an oligonucleotide probe of the invention can also be used as a binding agent to capture, isolate, or enrich, a cell, cell fragment, vesicle or any other fragment or complex that comprises the antigen or functional fragments thereof.

[0061] The compositions and methods of the invention comprise individual oligonucleotides that are identified for use in assessing a biomarker profile. The invention further discloses compositions and methods of oligonucleotide pools that can be used to detect a biomarker profile in a given sample.

[0062] Oligonucleotide probes and sequences disclosed in the compositions and methods of the invention may be identified herein in the form of DNA or RNA. Unless otherwise specified, one of skill in the art will appreciate that an oligonucleotide may generally be synthesized as either form of nucleic acid and carry various chemical modifications and remain within the scope of the invention. The term aptamer may be used in the art to refer to a single oligonucleotide that binds specifically to a target of interest through mechanisms other than Watson crick base pairing, similar to binding of a monoclonal antibody to a particular antigen. Within the scope of this disclosure and unless stated explicitly or otherwise implicit in context, the terms aptamer, oligonucleotide and oligonucleotide probe, and variations thereof, may be used interchangeably to refer to an oligonucleotide capable of distinguishing biological entities of interest (e.g, biomarkers) whether or not the specific entity has been identified or whether the precise mode of binding has been determined.

[0063] An oligonucleotide probe of the invention can also be used to provide in vitro or in vivo detection or imaging, to provide any appropriate diagnostic readout (e.g., diagnostic, prognostic or theranostic).

[0064] Separately, an oligonucleotide probe of the invention can also be used for treatment or as a therapeutic to specifically target a cell, tissue or organ.

### Aptamers

[0065] SELEX. A suitable method for generating an aptamer is with the process entitled “Systematic Evolution of Ligands by Exponential Enrichment” (“SELEX”) generally described in, e.g., U.S. patent application Ser. No. 07/536,428, filed Jun. 11, 1990, now abandoned, U.S. Pat. No. 5,475,096 entitled “Nucleic Acid Ligands”, and U.S. Pat. No. 5,270,163 (see also WO 91/19813) entitled “Nucleic Acid Ligands”. Each SELEX-identified nucleic acid ligand, i.e., each aptamer, is a specific ligand of a given target compound or molecule. The SELEX process is based on the unique insight that nucleic acids have sufficient capacity for forming a variety of two- and three-dimensional structures and sufficient chemical versatility available within their monomers to act as ligands (i.e., form specific binding pairs) with virtually any chemical compound, whether monomeric or polymeric. Molecules of any size or composition can serve as targets.

[0066] SELEX relies as a starting point upon a large library or pool of single stranded oligonucleotides comprising randomized sequences. The oligonucleotides can be modified or unmodified DNA, RNA, or DNA/RNA hybrids. In some examples, the pool comprises 100% random or partially random oligonucleotides. In other examples, the pool comprises random or partially random oligonucleotides containing at least one fixed and/or conserved sequence incorporated within randomized sequence. In other examples, the pool comprises random or partially random oligonucleotides containing at least one fixed and/or conserved sequence at its 5′ and/or 3′ end which may comprise a sequence shared by all the molecules of the oligonucleotide pool. Fixed sequences are sequences such as hybridization sites for PCR primers, promoter sequences for RNA polymerases (e.g., T3, T4, T7, and SP6), restriction sites, or homopolymeric sequences, such as poly A or poly T tracts, catalytic cores, sites for selective binding to affinity columns, and other sequences to facilitate cloning and/or sequencing of an oligonucleotide of interest. Conserved sequences are sequences, other than the previously described fixed sequences, shared by a number of aptamers that bind to the same target.

[0067] The oligonucleotides of the pool preferably include a randomized sequence portion as well as fixed sequences necessary for efficient amplification. Typically the oligonucleotides of the starting pool contain fixed 5′ and 3′ terminal sequences which flank an internal region of 30-50 random nucleotides. The randomized nucleotides can be produced in a number of ways including chemical synthesis and size selection from randomly cleaved cellular nucleic acids. Sequence variation in test nucleic acids can also be introduced or increased by mutagenesis before or during the selection/amplification iterations.

[0068] The random sequence portion of the oligonucleotide can be of any length and can comprise ribonucleotides and/or deoxyribonucleotides and can include modified or non-natural nucleotides or nucleotide analogs. See, e.g. U.S. Pat. No. 5,958,691; U.S. Pat. No. 5,660,985; U.S. Pat. No. 5,958,691; U.S. Pat. No. 5,698,687; U.S. Pat. No. 5,817,635; U.S. Pat. No. 5,672,695, and PCT Publication WO 92/07065. Random oligonucleotides can be synthesized from phosphodiester-linked nucleotides using solid phase oligonucleotide synthesis techniques well known in the art. See, e.g., Froehler et al., Nucl. Acid Res. 14:5399-5467 (1986) and Froehler et al., Tet. Lett. 27:5575-5578 (1986). Random oligonucleotides can also be synthesized using solution phase methods such as triester synthesis methods. See, e.g., Sood et al., Nucl. Acid Res. 4:2557 (1977) and Hirose et al., Tet. Lett., 28:2449 (1978). Typical syntheses carried out on automated DNA synthesis equipment yield 10¹⁴-10¹⁶ individual molecules, a number sufficient for most SELEX experiments. Sufficiently large regions of random sequence in the sequence design increases the likelihood that each synthesized molecule is likely to represent a unique sequence.

[0069] The starting library of oligonucleotides may be generated by automated chemical synthesis on a DNA synthesizer. To synthesize randomized sequences, mixtures of all four nucleotides are added at each nucleotide addition step during the synthesis process, allowing for random incorporation of nucleotides. As stated above, in one embodiment, random oligonucleotides comprise entirely random sequences; however, in other embodiments, random oligonucleotides can comprise stretches of nonrandom or partially random sequences. Partially random sequences can be created by adding the four nucleotides in different molar ratios at each addition step.

[0070] The starting library of oligonucleotides may be for example, RNA, DNA, or RNA/DNA hybrid. In those instances where an RNA library is to be used as the starting library it is typically generated by transcribing a DNA library in vitro using T7 RNA polymerase or modified T7 RNA polymerases and purified. The library is then mixed with the target under conditions favorable for binding and subjected to step-wise iterations of binding, partitioning and amplification, using the same general selection scheme, to achieve virtually any desired criterion of binding affinity and selectivity. More specifically, starting with a mixture containing the starting pool of nucleic acids, the SELEX method includes steps of: (a) contacting the mixture with the target under conditions favorable for binding; (b) partitioning unbound nucleic acids from those nucleic acids which have bound specifically to target molecules; (c) dissociating the nucleic acid-target complexes; (d) amplifying the nucleic acids dissociated from the nucleic acid-target complexes to yield a ligand-enriched mixture of nucleic acids; and (e) reiterating the steps of binding, partitioning, dissociating and amplifying through as many cycles as desired to yield highly specific, high affinity nucleic acid ligands to the target molecule. In those instances where RNA aptamers are being selected, the SELEX method further comprises the steps of: (i) reverse transcribing the nucleic acids dissociated from the nucleic acid-target complexes before amplification in step (d); and (ii) transcribing the amplified nucleic acids from step (d) before restarting the process.

[0071] Within a nucleic acid mixture containing a large number of possible sequences and structures, there is a wide range of binding affinities for a given target. A nucleic acid mixture comprising, for example, a 20 nucleotide randomized segment can have 4²⁰ candidate possibilities. Those which have the higher affinity constants for the target are most likely to bind to the target. After partitioning, dissociation and amplification, a second nucleic acid mixture is generated, enriched for the higher binding affinity candidates. Additional rounds of selection progressively favor better ligands until the resulting nucleic acid mixture is predominantly composed of only one or a few sequences. These can then be cloned, sequenced and individually tested for binding affinity as pure ligands or aptamers.

[0072] Cycles of selection and amplification are repeated until a desired goal is achieved. In the most general case, selection/amplification is continued until no significant improvement in binding strength is achieved on repetition of the cycle. The method is typically used to sample approximately 10¹⁴ different nucleic acid species but may be used to sample as many as about 10¹⁸ different nucleic acid species. Generally, nucleic acid aptamer molecules are selected in a 5 to 20 cycle procedure. In one embodiment, heterogeneity is introduced only in the initial selection stages and does not occur throughout the replicating process.

[0073] In one embodiment of SELEX, the selection process is so efficient at isolating those nucleic acid ligands that bind most strongly to the selected target, that only one cycle of selection and amplification is required. Such an efficient selection may occur, for example, in a chromatographic-type process wherein the ability of nucleic acids to associate with targets bound on a column operates in such a manner that the column is sufficiently able to allow separation and isolation of the highest affinity nucleic acid ligands.

[0074] In many cases, it is not necessarily desirable to perform the iterative steps of SELEX until a single nucleic acid ligand is identified. The target-specific nucleic acid ligand solution may include a family of nucleic acid structures or motifs that have a number of conserved sequences and a number of sequences which can be substituted or added without significantly affecting the affinity of the nucleic acid ligands to the target. By terminating the SELEX process prior to completion, it is possible to determine the sequence of a number of members of the nucleic acid ligand solution family. The invention provides for the identification of aptamer pools and uses thereof that jointly can be used to characterize a test sample. For example, the aptamer pools can be identified through rounds of positive and negative selection to identify microvesicle indicative of a disease or condition. The invention further provides use of such aptamer pools to detect and/or quantify such microvesicles in a sample, thereby allowing a diagnosis, prognosis or theranosis to be provided.

[0075] A variety of nucleic acid primary, secondary and tertiary structures are known to exist. The structures or motifs that have been shown most commonly to be involved in non-Watson-Crick type interactions are referred to as hairpin loops, symmetric and asymmetric bulges, pseudoknots and myriad combinations of the same. Almost all known cases of such motifs suggest that they can be formed in a nucleic acid sequence of no more than 30 nucleotides. For this reason, it is often preferred that SELEX procedures with contiguous randomized segments be initiated with nucleic acid sequences containing a randomized segment of between about 20 to about 50 nucleotides and in some embodiments, about 30 to about 40 nucleotides. In one example, the 5′-fixed:random:3′-fixed sequence comprises a random sequence of about 30 to about 50 nucleotides.

[0076] The core SELEX method has been modified to achieve a number of specific objectives. For example, U.S. Pat. No. 5,707,796 describes the use of SELEX in conjunction with gel electrophoresis to select nucleic acid molecules with specific structural characteristics, such as bent DNA. U.S. Pat. No. 5,763,177 describes SELEX based methods for selecting nucleic acid ligands containing photoreactive groups capable of binding and/or photocrosslinking to and/or photoinactivating a target molecule. U.S. Pat. No. 5,567,588 and U.S. Pat. No. 5,861,254 describe SELEX based methods which achieve highly efficient partitioning between oligonucleotides having high and low affinity for a target molecule. U.S. Pat. No. 5,496,938 describes methods for obtaining improved nucleic acid ligands after the SELEX process has been performed. U.S. Pat. No. 5,705,337 describes methods for covalently linking a ligand to its target.

[0077] SELEX can also be used to obtain nucleic acid ligands that bind to more than one site on the target molecule, and to obtain nucleic acid ligands that include non-nucleic acid species that bind to specific sites on the target. SELEX provides means for isolating and identifying nucleic acid ligands which bind to any envisionable target, including large and small biomolecules such as nucleic acid-binding proteins and proteins not known to bind nucleic acids as part of their biological function as well as lipids, cofactors and other small molecules. For example, U.S. Pat. No. 5,580,737 discloses nucleic acid sequences identified through SELEX which are capable of binding with high affinity to caffeine and the closely related analog, theophylline.

[0078] Counter-SELEX is a method for improving the specificity of nucleic acid ligands to a target molecule by eliminating nucleic acid ligand sequences with cross-reactivity to one or more non-target molecules. Counter-SELEX is comprised of the steps of: (a) preparing a candidate mixture of nucleic acids; (b) contacting the candidate mixture with the target, wherein nucleic acids having an increased affinity to the target relative to the candidate mixture may be partitioned from the remainder of the candidate mixture; (c) partitioning the increased affinity nucleic acids from the remainder of the candidate mixture; (d) dissociating the increased affinity nucleic acids from the target; e) contacting the increased affinity nucleic acids with one or more non-target molecules such that nucleic acid ligands with specific affinity for the non-target molecule(s) are removed; and (f) amplifying the nucleic acids with specific affinity only to the target molecule to yield a mixture of nucleic acids enriched for nucleic acid sequences with a relatively higher affinity and specificity for binding to the target molecule. As described above for SELEX, cycles of selection and amplification are repeated until a desired goal is achieved.

[0079] One potential problem encountered in the use of nucleic acids as therapeutics and vaccines is that oligonucleotides in their phosphodiester form may be quickly degraded in body fluids by intracellular and extracellular enzymes such as endonucleases and exonucleases before the desired effect is manifest. The SELEX method thus encompasses the identification of high-affinity nucleic acid ligands containing modified nucleotides conferring improved characteristics on the ligand, such as improved in vivo stability or improved delivery characteristics. Examples of such modifications include chemical substitutions at the ribose and/or phosphate and/or base positions. SELEX identified nucleic acid ligands containing modified nucleotides are described, e.g., in U.S. Pat. No. 5,660,985, which describes oligonucleotides containing nucleotide derivatives chemically modified at the 2′ position of ribose, 5′ position of pyrimidines, and 8′ position of purines, U.S. Pat. No. 5,756,703 which describes oligonucleotides containing various 2′-modified pyrimidines, and U.S. Pat. No. 5,580,737 which describes highly specific nucleic acid ligands containing one or more nucleotides modified with 2′-amino (2′-NH₂), 2′-fluoro (2′-F), and/or 2′-O-methyl (2′-OMe) substituents.

[0080] Modifications of the nucleic acid ligands contemplated in this invention include, but are not limited to, those which provide other chemical groups that incorporate additional charge, polarizability, hydrophobicity, hydrogen bonding, electrostatic interaction, and fluxionality to the nucleic acid ligand bases or to the nucleic acid ligand as a whole. Modifications to generate oligonucleotide populations which are resistant to nucleases can also include one or more substitute internucleotide linkages, altered sugars, altered bases, or combinations thereof. Such modifications include, but are not limited to, 2′-position sugar modifications, 5-position pyrimidine modifications, 8-position purine modifications, modifications at exocyclic amines, substitution of 4-thiouridine, substitution of 5-bromo or 5-iodo-uracil; backbone modifications, phosphorothioate or allyl phosphate modifications, methylations, and unusual base-pairing combinations such as the isobases isocytidine and isoguanosine. Modifications can also include 3′ and 5′ modifications such as capping.

[0081] In one embodiment, oligonucleotides are provided in which the P(O)O group is replaced by P(O)S (“thioate”), P(S)S (“dithioate”), P(O)NR₂ (“amidate”), P(O)R, P(O)OR′, CO or CH₂ (“formacetal”) or 3′-amine (—NH—CH₂—CH₂—), wherein each R or R′ is independently H or substituted or unsubstituted alkyl. Linkage groups can be attached to adjacent nucleotides through an —O—, —N—, or —S— linkage. Not all linkages in the oligonucleotide are required to be identical. As used herein, the term phosphorothioate encompasses one or more non-bridging oxygen atoms in a phosphodiester bond replaced by one or more sulfur atoms.

[0082] In further embodiments, the oligonucleotides comprise modified sugar groups, for example, one or more of the hydroxyl groups is replaced with halogen, aliphatic groups, or functionalized as ethers or amines. In one embodiment, the 2′-position of the furanose residue is substituted by any of an O-methyl, O-alkyl, O-allyl, S-alkyl, S-allyl, or halo group. Methods of synthesis of 2′-modified sugars are described, e.g., in Sproat, et al., Nucl. Acid Res. 19:733-738 (1991); Cotten, et al., Nucl. Acid Res. 19:2629-2635 (1991); and Hobbs, et al., Biochemistry 12:5138-5145 (1973). Other modifications are known to one of ordinary skill in the art. Such modifications may be pre-SELEX process modifications or post-SELEX process modifications (modification of previously identified unmodified ligands) or may be made by incorporation into the SELEX process.

[0083] Pre-SELEX process modifications or those made by incorporation into the SELEX process yield nucleic acid ligands with both specificity for their SELEX target and improved stability, e.g., in vivo stability. Post-SELEX process modifications made to nucleic acid ligands may result in improved stability, e.g., in vivo stability without adversely affecting the binding capacity of the nucleic acid ligand.

[0084] The SELEX method encompasses combining selected oligonucleotides with other selected oligonucleotides and non-oligonucleotide functional units as described in U.S. Pat. No. 5,637,459 and U.S. Pat. No. 5,683,867. The SELEX method further encompasses combining selected nucleic acid ligands with lipophilic or non-immunogenic high molecular weight compounds in a diagnostic or therapeutic complex, as described, e.g., in U.S. Pat. No. 6,011,020, U.S. Pat. No. 6,051,698, and PCT Publication No. WO 98/18480. These patents and applications teach the combination of a broad array of shapes and other properties, with the efficient amplification and replication properties of oligonucleotides, and with the desirable properties of other molecules.

[0085] The identification of nucleic acid ligands to small, flexible peptides via the SELEX method has also been explored. Small peptides have flexible structures and usually exist in solution in an equilibrium of multiple conformers, and thus it was initially thought that binding affinities may be limited by the conformational entropy lost upon binding a flexible peptide. However, the feasibility of identifying nucleic acid ligands to small peptides in solution was demonstrated in U.S. Pat. No. 5,648,214. In this patent, high affinity RNA nucleic acid ligands to substance P, an 11 amino acid peptide, were identified.

[0086] The aptamers with specificity and binding affinity to the target(s) of the present invention can be selected by the SELEX N process as described herein. As part of the SELEX process, the sequences selected to bind to the target are then optionally minimized to determine the minimal sequence having the desired binding affinity. The selected sequences and/or the minimized sequences are optionally optimized by performing random or directed mutagenesis of the sequence to increase binding affinity or alternatively to determine which positions in the sequence are essential for binding activity. Additionally, selections can be performed with sequences incorporating modified nucleotides to stabilize the aptamer molecules against degradation in vivo.

[0087] 2′ Modified SELEX

[0088] For an aptamer to be suitable for use as a therapeutic, it is preferably inexpensive to synthesize, and safe and stable in vivo. Wild-type RNA and DNA aptamers are typically not stable is vivo because of their susceptibility to degradation by nucleases. Resistance to nuclease degradation can be greatly increased by the incorporation of modifying groups at the 2′-position.

[0089] Fluoro and amino groups have been successfully incorporated into oligonucleotide pools from which aptamers have been subsequently selected. However, these modifications greatly increase the cost of synthesis of the resultant aptamer, and may introduce safety concerns in some cases because of the possibility that the modified nucleotides could be recycled into host DNA by degradation of the modified oligonucleotides and subsequent use of the nucleotides as substrates for DNA synthesis.

[0090] Aptamers that contain 2′-O-methyl (“2′-OMe”) nucleotides, as provided herein, may overcome one or more potential drawbacks. Oligonucleotides containing 2′-OMe nucleotides are nuclease-resistant and inexpensive to synthesize. Although 2′-OMe nucleotides are ubiquitous in biological systems, natural polymerases do not accept 2′-OMe NTPs as substrates under physiological conditions, thus there are no safety concerns over the recycling of 2′-OMe nucleotides into host DNA. The SELEX method used to generate 2′-modified aptamers is described, e.g., in U.S. Provisional Patent Application Ser. No. 60/430,761, filed Dec. 3, 2002, U.S. Provisional Patent Application Ser. No. 60/487,474, filed Jul. 15, 2003, U.S. Provisional Patent Application Ser. No. 60/517,039, filed Nov. 4, 2003, U.S. patent application Ser. No. 10/729,581, filed Dec. 3, 2003, and U.S. patent application Ser. No. 10/873,856, filed Jun. 21, 2004, entitled “Method for in vitro Selection of 2′-O-methyl substituted Nucleic Acids”, each of which is herein incorporated by reference in its entirety.

### Methods

[0091] Biomarker Detection and Diagnostics

[0092] The aptamers of the invention can be used in various methods to assess presence or level of biomarkers in a biological sample, e.g., biological entities of interest such as proteins, nucleic acids, or microvesicles. The aptamer functions as a binding agent to assess presence or level of the cognate target molecule. Therefore, in various embodiments of the invention directed to diagnostics, prognostics or theranostics, one or more aptamers of the invention are configured in a ligand-target based assay, where one or more aptamer of the invention is contacted with a selected biological sample, where the or more aptamer associates with or binds to its target molecules. Aptamers of the invention are used to identify candidate biosignatures based on the biological samples assessed and biomarkers detected. In further embodiments, aptamers may themselves provide a biosignature for a particular condition or disease. A biosignature refers to a biomarker profile of a biological sample comprising a presence, level or other characteristic that can be assessed (including without limitation a sequence, mutation, rearrangement, translocation, deletion, epigenetic modification, methylation, post-translational modification, allele, activity, complex partners, stability, half life, and the like) of one or more biomarker of interest. Biosignatures can be used to evaluate diagnostic and/or prognostic criteria such as presence of disease, disease staging, disease monitoring, disease stratification, or surveillance for detection, metastasis or recurrence or progression of disease. For example, methods of the invention using aptamers against microvesicle surface antigen are useful for correlating a biosignature comprising microvesicle antigens to a selected condition or disease. A biosignature can also be used clinically in making decisions concerning treatment modalities including therapeutic intervention. A biosignature can further be used clinically to make treatment decisions, including whether to perform surgery or what treatment standards should be used along with surgery (e.g., either pre-surgery or post-surgery). As an illustrative example, a biosignature of circulating biomarkers that indicates an aggressive form of cancer may call for a more aggressive surgical procedure and/or more aggressive therapeutic regimen to treat the patient.

[0093] A biosignature can be used in any methods disclosed herein, e.g., to assess whether a subject is afflicted with disease, is at risk for developing disease or to assess the stage or progression of the disease. For example, a biosignature can be used to assess whether a subject has prostate cancer, colon cancer, or other cancer as described herein. Furthermore, a biosignature can be used to determine a stage of a disease or condition, such as colon cancer. The biosignature/biomarker profile comprising a microvesicle can include assessment of payload within the microvesicle. For example, one or more aptamer of the invention can be used to capture a microvesicle population, thereby providing readout of microvesicle antigens, and then the payload content within the captured microvesicles can be assessed, thereby providing further biomarker readout of the payload content.

[0094] A biosignature for characterizing a phenotype may comprise any number of useful criteria. As described further below, the term “phenotype” as used herein can mean any trait or characteristic that is attributed to a biosignature/biomarker profile. A phenotype can be detected or identified in part or in whole using the compositions and/or methods of the invention. In some embodiments, at least one criterion is used for each biomarker. In some embodiments, at least 1, 2, 3, 4, 5, 6, 7, 8, 9, 10, 15, 20, 30, 40, 50, 60, 70, 80, 90 or at least 100 criteria are used. For example, for the characterizing of a cancer, a number of different criteria can be used when the subject is diagnosed with a cancer: 1) if the amount of microRNA in a sample from a subject is higher than a reference value; 2) if the amount of a microRNA within cell type specific vesicles (i.e. vesicles derived from a specific tissue or organ) is higher than a reference value; or 3) if the amount of microRNA within vesicles with one or more cancer specific biomarkers is higher than a reference value. Similar rules can apply if the amount of microRNA is less than or the same as the reference. The method can further include a quality control measure, such that the results are provided for the subject if the samples meet the quality control measure. In some embodiments, if the criteria are met but the quality control is questionable, the subject is reassessed.

[0095] Theranostics

[0096] A biosignature can be used in therapy related diagnostics to provide tests useful to diagnose a disease or choose the correct treatment regimen, such as provide a theranosis. Theranostics includes diagnostic testing that provides the ability to affect therapy or treatment of a diseased state. Theranostics testing provides a theranosis in a similar manner that diagnostics or prognostic testing provides a diagnosis or prognosis, respectively. As used herein, theranostics encompasses any desired form of therapy related testing, including predictive medicine, personalized medicine, integrated medicine, pharmacodiagnostics and Dx/Rx partnering. Therapy related tests can be used to predict and assess drug response in individual subjects, i.e., to provide personalized medicine. Predicting a drug response can be determining whether a subject is a likely responder or a likely non-responder to a candidate therapeutic agent, e.g., before the subject has been exposed or otherwise treated with the treatment. Assessing a drug response can be monitoring a response to a drug, e.g., monitoring the subject's improvement or lack thereof over a time course after initiating the treatment. Therapy related tests are useful to select a subject for treatment who is particularly likely to benefit from the treatment or to provide an early and objective indication of treatment efficacy in an individual subject. Thus, a biosignature as disclosed herein may indicate that treatment should be altered to select a more promising treatment, thereby avoiding the great expense of delaying beneficial treatment and avoiding the financial and morbidity costs of administering an ineffective drug(s).

[0097] The compositions and methods of the invention can be used to identify or detect a biosignature associated with a variety of diseases and disorders, which include, but are not limited to cardiovascular disease, cancer, infectious diseases, sepsis, neurological diseases, central nervous system related diseases, endovascular related diseases, and autoimmune related diseases. Therapy related diagnostics (i.e., theranostics) are also useful in clinical diagnosis and management of many such diseases and disorders. Therapy related diagnostics also aid in the prediction of drug toxicity, drug resistance or drug response. Therapy related tests may be developed in any suitable diagnostic testing format, which include, but are not limited to, e.g., immunohistochemical tests, clinical chemistry, immunoassay, cell-based technologies, nucleic acid tests or body imaging methods. Therapy related tests can further include but are not limited to, testing that aids in the determination of therapy, testing that monitors for therapeutic toxicity, or response to therapy testing. Thus, a biosignature can be used to predict or monitor a subject's response to a treatment. A biosignature can be determined at different time points for a subject after initiating, removing, or altering a particular treatment.

[0098] In some embodiments, the compositions and methods of the invention provide for a determination or prediction as to whether a subject is responding to a treatment is made based on a change in the amount of one or more components of a biosignature (i.e., the microRNA, vesicles and/or biomarkers of interest), an amount of one or more components of a particular biosignature, or the biosignature detected for the components. In another embodiment, a subject's condition is monitored by determining a biosignature at different time points. The progression, regression, or recurrence of a condition is determined. Response to therapy can also be measured over a time course. Thus, the invention provides a method of monitoring a status of a disease or other medical condition in a subject, comprising isolating or detecting a biosignature from a biological sample from the subject, detecting the overall amount of the components of a particular biosignature, or detecting the biosignature of one or more components (such as the presence, absence, or expression level of a biomarker). The biosignatures are used to monitor the status of the disease or condition.

[0099] One or more novel biosignatures of a vesicle can also be identified. For example, one or more vesicles can be isolated from a subject that responds to a drug treatment or treatment regimen and compared to a reference, such as another subject that does not respond to the drug treatment or treatment regimen. Differences between the biosignatures can be determined and used to identify other subjects as responders or non-responders to a particular drug or treatment regimen.

[0100] In some embodiments, a biosignature is used to determine whether a particular disease or condition is resistant to a drug, in which case a physician need not waste valuable time with such drug treatment. To obtain early validation of a drug choice or treatment regimen, a biosignature is determined for a sample obtained from a subject. The biosignature is used to assess whether the particular subject's disease has the biomarker associated with drug resistance. Such a determination enables doctors to devote critical time as well as the patient's financial resources to effective treatments.

[0101] Biosignatures can be used in the theranosis of a cancer, such as identifying whether a subject suffering from cancer is a likely responder or non-responder to a particular cancer treatment. The subject methods can be used to theranose cancers including those listed herein, e.g., in the “Phenotypes” section below. These include without limitation lung cancer, non-small cell lung cancer small cell lung cancer (including small cell carcinoma (oat cell cancer), mixed small cell/large cell carcinoma, and combined small cell carcinoma), colon cancer, breast cancer, prostate cancer, liver cancer, pancreatic cancer, brain cancer, kidney cancer, ovarian cancer, stomach cancer, melanoma, bone cancer, gastric cancer, breast cancer, glioma, glioblastoma, hepatocellular carcinoma, papillary renal carcinoma, head and neck squamous cell carcinoma, leukemia, lymphoma, myeloma, or other solid tumors.

[0102] A biosignature of circulating biomarkers, including markers associated with a component present in a biological sample (e.g., cell, cell-fragment, cell-derived extracellular vesicle), in a sample from a subject suffering from a cancer can be used select a candidate treatment for the subject. The biosignature can be determined according to the methods of the invention presented herein. In some embodiments, the candidate treatment comprises a standard of care for the cancer. The treatment can be a cancer treatment such as radiation, surgery, chemotherapy or a combination thereof. The cancer treatment can be a therapeutic such as anti-cancer agents and chemotherapeutic regimens. Further drug associations and rules that are used in embodiments of the invention are found in PCT/US2007/69286, filed May 18, 2007; PCT/US2009/60630, filed Oct. 14, 2009; PCT/2010/000407, filed Feb. 11, 2010; PCT/US12/41393, filed Jun. 7, 2012; PCT/US2013/073184, filed Dec. 4, 2013; PCT/US2010/54366, filed Oct. 27, 2010; PCT/US11/67527, filed Dec. 28, 2011; PCT/US15/13618, filed Jan. 29, 2015; and PCT/US16/20657, filed Mar. 3, 2016.

### Biomarker Detection

[0103] The compositions and methods of the invention can be used to assess any useful biomarkers in a biological sample for characterizing a phenotype associated with the sample. Such biomarkers include all sorts of biological entities such as proteins, nucleic acids, lipids, carbohydrates, complexes of any thereof, and microvesicles. Various molecules associated with a microvesicle surface or enclosed within the microvesicle (referred to herein as “payload”) can serve as biomarkers. The microvesicles themselves can also be used as biomarkers.

[0104] The aptamers of the invention can be used to assess levels or presence of a microvesicle population. See, e.g., FIGS. 19B-C. The aptamers of the invention can also be used to assess levels or presence of their specific target molecule. See, e.g., FIG. 19A. In addition, aptamers of the invention are used to capture or isolated a component present in a biological sample that has the aptamer's target molecule present. For example, if a given microvesicle surface antigen is present on a cell, cell fragment or cell-derived extracellular vesicle. A binding agent to the biomarker, including without limitation an aptamer provided by the invention, may be used to capture or isolate the cell, cell fragment or cell-derived extracellular vesicles. See, e.g., FIGS. 2A-B, 19A. Such captured or isolated entities may be further characterized to assess additional surface antigens or internal “payload” molecules present (i.e., nucleic acid molecules, lipids, sugars, polypeptides or functional fragments thereof, or anything else present in the cellular milieu that may be used as a biomarker), where one or more biomarkers provide a biosignature to assess a desired phenotype, such as disease or condition. See, e.g., FIG. 2F. Therefore, aptamers of the invention are used not only to assess one or more microvesicle surface antigen of interest but are also used to separate a component present in a biological sample, where the components themselves can be further assessed to identify a candidate biosignature.

[0105] The methods of the invention can comprise multiplex analysis of at least 2, 3, 4, 5, 6, 7, 8, 9, 10, 11, 12, 13, 14, 15, 16, 17, 18, 19, 20, 25, 50, 75 or 100 different biomarkers. For example, an assay of a heterogeneous population of vesicles can be performed with a plurality of particles that are differentially labeled. There can be at least 2, 3, 4, 5, 6, 7, 8, 9, 10, 11, 12, 13, 14, 15, 16, 17, 18, 19, 20, 25, 50, 75 or 100 differentially labeled particles. The particles may be externally labeled, such as with a tag, or they may be intrinsically labeled. Each differentially labeled particle can be coupled to a capture agent, such as a binding agent, for a vesicle, resulting in capture of a vesicle. The multiple capture agents can be selected to characterize a phenotype of interest, including capture agents against general vesicle biomarkers, cell-of-origin specific biomarkers, and disease biomarkers. One or more biomarkers of the captured vesicle can then be detected by a plurality of binding agents. The binding agent can be directly labeled to facilitate detection. Alternatively, the binding agent is labeled by a secondary agent. For example, the binding agent may be an antibody for a biomarker on the vesicle, wherein the binding agent is linked to biotin. A secondary agent comprises streptavidin linked to a reporter and can be added to detect the biomarker. In some embodiments, the captured vesicle is assayed for at least 2, 3, 4, 5, 6, 7, 8, 9, 10, 11, 12, 13, 14, 15, 16, 17, 18, 19, 20, 25, 50, 75 or 100 different biomarkers. For example, multiple detectors, i.e., detection of multiple biomarkers of a captured vesicle or population of vesicles, can increase the signal obtained, permitted increased sensitivity, specificity, or both, and the use of smaller amounts of samples. Detection can be with more than one biomarker, including without limitation more than one vesicle marker such as in any of Tables 3-4, and Tables 18-25.

[0106] An immunoassay based method (e.g., sandwich assay) can be used to detect a biomarker of a vesicle. An example includes ELISA. A binding agent can be bound to a well. For example, a binding agent such as an aptamer or antibody to an antigen of a vesicle can be attached to a well. A biomarker on the captured vesicle can be detected based on the methods described herein. FIG. 2A shows an illustrative schematic for a sandwich-type of immunoassay. The capture agent can be against a vesicle antigen of interest, e.g., a general vesicle biomarker, a cell-of-origin marker, or a disease marker. In the figure, the captured vesicles are detected using fluorescently labeled binding agent (detection agent) against vesicle antigens of interest. Multiple capture binding agents can be used, e.g., in distinguishable addresses on an array or different wells of an immunoassay plate. The detection binding agents can be against the same antigen as the capture binding agent, or can be directed against other markers. The capture binding agent can be any useful binding agent, e.g., tethered aptamers, antibodies or lectins, and/or the detector antibodies can be similarly substituted, e.g., with detectable (e.g., labeled) aptamers, antibodies, lectins or other binding proteins or entities. In an embodiment, one or more capture agents to a general vesicle biomarker, a cell-of-origin marker, and/or a disease marker are used along with detection agents against general vesicle biomarker, such as tetraspanin molecules including without limitation one or more of CD9, CD63 and CD81, or other markers in Table 3 herein. Examples of microvesicle surface antigens are disclosed herein, e.g. in Tables 3-4 and 18-25, or are known in the art, and examples useful in methods and compositions of the invention are disclosed of International Patent Application Nos. PCT/US2009/62880, filed Oct. 30, 2009; PCT/US2009/006095, filed Nov. 12, 2009; PCT/US2011/26750, filed Mar. 1, 2011; PCT/US2011/031479, filed Apr. 6, 2011; PCT/US11/48327, filed Aug. 18, 2011; PCT/US2008/71235, filed Jul. 25, 2008; PCT/US10/58461, filed Nov. 30, 2010; PCT/US2011/21160, filed Jan. 13, 2011; PCT/US2013/030302, filed Mar. 11, 2013; PCT/US12/25741, filed Feb. 17, 2012; PCT/2008/76109, filed Sep. 12, 2008; PCT/US12/42519, filed Jun. 14, 2012; PCT/US12/50030, filed Aug. 8, 2012; PCT/US12/49615, filed Aug. 3, 2012; PCT/US12/41387, filed Jun. 7, 2012; PCT/US2013/072019, filed Nov. 26, 2013; PCT/US2014/039858, filed May 28, 2013; PCT/IB2013/003092, filed Oct. 23, 2013; PCT/US13/76611, filed Dec. 19, 2013; PCT/US14/53306, filed Aug. 28, 2014; and PCT/US15/62184, filed Nov. 23, 2015; each of which applications is incorporated herein by reference in its entirety.

[0107] FIG. 2D presents an illustrative schematic for analyzing vesicles according to the methods of the invention. Capture agents are used to capture vesicles, detectors are used to detect the captured vesicles, and the level or presence of the captured and detected microvesicles is used to characterize a phenotype. Capture agents, detectors and characterizing phenotypes can be any of those described herein. For example, capture agents include antibodies or aptamers tethered to a substrate that recognize a vesicle antigen of interest, detectors include labeled antibodies or aptamers to a vesicle antigen of interest, and characterizing a phenotype includes a diagnosis, prognosis, or theranosis of a disease. In the scheme shown in FIG. 2D i), a population of vesicles is captured with one or more capture agents against general vesicle biomarkers (200). The captured vesicles are then labeled with detectors against cell-of-origin biomarkers (201) and/or disease specific biomarkers (202). If only cell-of-origin detectors are used (201), the biosignature used to characterize the phenotype (203) can include the general vesicle markers (200) and the cell-of-origin biomarkers (201). If only disease detectors are used (202), the biosignature used to characterize the phenotype (203) can include the general vesicle markers (200) and the disease biomarkers (202). Alternately, detectors are used to detect both cell-of-origin biomarkers (201) and disease specific biomarkers (202). In this case, the biosignature used to characterize the phenotype (203) can include the general vesicle markers (200), the cell-of-origin biomarkers (201) and the disease biomarkers (202). The biomarkers combinations are selected to characterize the phenotype of interest and can be selected from the biomarkers and phenotypes described herein, e.g., in Tables 1, 3-4 and 18-25.

[0108] In the scheme shown in FIG. 2D ii), a population of vesicles is captured with one or more capture agents against cell-of-origin biomarkers (210) and/or disease biomarkers (211). The captured vesicles are then detected using detectors against general vesicle biomarkers (212). If only cell-of-origin capture agents are used (210), the biosignature used to characterize the phenotype (213) can include the cell-of-origin biomarkers (210) and the general vesicle markers (212). If only disease biomarker capture agents are used (211), the biosignature used to characterize the phenotype (213) can include the disease biomarkers (211) and the general vesicle biomarkers (212). Alternately, capture agents to one or more cell-of-origin biomarkers (210) and one or more disease specific biomarkers (211) are used to capture vesicles. In this case, the biosignature used to characterize the phenotype (213) can include the cell-of-origin biomarkers (210), the disease biomarkers (211), and the general vesicle markers (213). The biomarkers combinations are selected to characterize the phenotype of interest and can be selected from the biomarkers and phenotypes described herein.

[0109] The methods of the invention comprise capture and detection of microvesicles of interest using any combination of useful biomarkers. For example, a microvesicle population can be captured using one or more binding agent to any desired combination of cell of origin, disease specific, or general vesicle markers. The captured microvesicles can then be detected using one or more binding agent to any desired combination of cell of origin, disease specific, or general vesicle markers. FIG. 2E represents a flow diagram of such configurations. Any one or more of a cell-of-origin biomarker (240), disease biomarkers (241), and general vesicle biomarker (242) is used to capture a microvesicle population. Thereafter, any one or more of a cell-of-origin biomarker (243), disease biomarkers (244), and general vesicle biomarker (245) is used to detect the captured microvesicle population. The biosignature of captured and detected microvesicles is then used to characterize a phenotype. The biomarkers combinations are selected to characterize the phenotype of interest and can be selected from the biomarkers and phenotypes described herein.

[0110] A microvesicle payload molecule can be assessed as a member of a biosignature panel. A payload molecule comprises any of the biological entities contained within a cell, cell fragment or vesicle membrane. These entities include without limitation nucleic acids, e.g., mRNA, microRNA, or DNA fragments; protein, e.g., soluble and membrane associated proteins; carbohydrates; lipids; metabolites; and various small molecules, e.g., hormones. The payload can be part of the cellular milieu that is encapsulated as a vesicle is formed in the cellular environment. In some embodiments of the invention, the payload is analyzed in addition to detecting vesicle surface antigens. Specific populations of vesicles can be captured as described above then the payload in the captured vesicles can be used to characterize a phenotype. For example, vesicles captured on a substrate can be further isolated to assess the payload therein. Alternately, the vesicles in a sample are detected and sorted without capture. The vesicles so detected can be further isolated to assess the payload therein. In an embodiment, vesicle populations are sorted by flow cytometry and the payload in the sorted vesicles is analyzed. In the scheme shown in FIG. 2F iv), a population of vesicles is captured and/or detected (220) using one or more of cell-of-origin biomarkers (220), disease biomarkers (221), and/or general vesicle markers (222). The payload of the isolated vesicles is assessed (223). A biosignature detected within the payload can be used to characterize a phenotype (224). In a non-limiting example, a vesicle population can be analyzed in a plasma sample from a patient using antibodies against one or more vesicle antigens of interest. The antibodies can be capture antibodies which are tethered to a substrate to isolate a desired vesicle population. Alternately, the antibodies can be directly labeled and the labeled vesicles isolated by sorting with flow cytometry. The presence or level of microRNA or mRNA extracted from the isolated vesicle population can be used to detect a biosignature. The biosignature is then used to diagnose, prognose or theranose the patient.

[0111] In other embodiments, vesicle or cellular payload is analyzed in a population (e.g., cells or vesicles) without first capturing or detected subpopulations of vesicles. For example, a cellular or extracellular vesicle population can be generally isolated from a sample using centrifugation, filtration, chromatography, or other techniques as described herein and known in the art. The payload of such sample components can be analyzed thereafter to detect a biosignature and characterize a phenotype. In the scheme shown in FIG. 2F v), a population of vesicles is isolated (230) and the payload of the isolated vesicles is assessed (231). A biosignature detected within the payload can be used to characterize a phenotype (232). In a non-limiting example, a vesicle population is isolated from a plasma sample from a patient using size exclusion and membrane filtration. The presence or level of microRNA or mRNA extracted from the vesicle population is used to detect a biosignature. The biosignature is then used to diagnose, prognose or theranose the patient.

[0112] The biomarkers used to detect a vesicle population can be selected to detect a microvesicle population of interest, e.g., a population of vesicles that provides a diagnosis, prognosis or theranosis of a selected condition or disease, including but not limited to a cancer, a premalignant condition, an inflammatory disease, an immune disease, an autoimmune disease or disorder, a cardiovascular disease or disorder, neurological disease or disorder, infectious disease or pain. See Section “Phenotypes” herein for more detail. In an embodiment, the biomarkers are selected from the group consisting of EpCam (epithelial cell adhesion molecule), CD9 (tetraspanin CD9 molecule), PCSA (prostate cell specific antigen, see Rokhlin et al., 5E10: a prostate-specific surface-reactive monoclonal antibody. Cancer Lett. 1998 131:129-36), CD63 (tetraspanin CD63 molecule), CD81 (tetraspanin CD81 molecule), PSMA (FOLH1, folate hydrolase (prostate-specific membrane antigen) 1), B7H3 (CD276 molecule), PSCA (prostate stem cell antigen), ICAM (intercellular adhesion molecule), STEAP (STEAP1, six transmembrane epithelial antigen of the prostate 1), KLK2 (kallikrein-related peptidase 2), SSX2 (synovial sarcoma, X breakpoint 2), SSX4 (synovial sarcoma, X breakpoint 4), PBP (prostatic binding protein), SPDEF (SAM pointed domain containing ets transcription factor), EGFR (epidermal growth factor receptor), and a combination thereof. One or more of these markers can provide a biosignature for a specific condition, such as to detect a cancer, including without limitation a carcinoma, a prostate cancer, a breast cancer, a lung cancer, a colorectal cancer, an ovarian cancer, melanoma, a brain cancer, or other type of cancer as disclosed herein. In an embodiment, a binding agent to one or more of these markers is used to capture a microvesicle population, and an aptamer of the invention is used to assist in detection of the capture vesicles as described herein. In other embodiments, an aptamer of the invention is used to capture a microvesicle population, and a binding agent to one or more of these markers is used to assist in detection of the capture vesicles as described herein. The binding agents can be any useful binding agent as disclosed herein or known in the art, e.g., antibodies or aptamers.

[0113] The methods of characterizing a phenotype can employ a combination of techniques to assess a component or population of components present in a biological sample of interest. For example, an aptamer of the invention can be used to assess a single cell, or a single extracellular vesicle or a population of cells or population of vesicles. A sample may be split into various aliquots, where each is analyzed separately. For example, protein content of one or more aliquot is determined and microRNA content of one or more other aliquot is determined. The protein content and microRNA content can be combined to characterize a phenotype. In another embodiment, a component present in a biological sample of interest is isolated and the payload therein is assessed (e.g., capture a population of subpopulation of vesicles using an aptamer of the invention and further assess nucleic acid or proteins present in the isolated vesicles).

[0114] In one embodiment, a population of vesicles with a given surface marker can be isolated by using a binding agent to a microvesicle surface marker. See, e.g., FIGS. 2A, 2B, 21A. The binding agent can be an aptamer that was identified to target the microvesicle surface marker using to the methods of the invention. The isolated vesicles is assessed for additional biomarkers such as surface content or payload, which can be contemporaneous to detection of the aptamer-specific target or the assessment of additional biomarkers can be before or subsequent to aptamer-specific target detection.

[0115] A biosignature can be detected qualitatively or quantitatively by detecting a presence, level or concentration of a circulating biomarker, e.g., a microRNA, protein, vesicle or other biomarker, as disclosed herein. These biosignature components can be detected using a number of techniques known to those of skill in the art. For example, a biomarker can be detected by microarray analysis, polymerase chain reaction (PCR) (including PCR-based methods such as real time polymerase chain reaction (RT-PCR), quantitative real time polymerase chain reaction (Q-PCR/qPCR) and the like), hybridization with allele-specific probes, enzymatic mutation detection, ligation chain reaction (LCR), oligonucleotide ligation assay (OLA), flow-cytometric heteroduplex analysis, chemical cleavage of mismatches, mass spectrometry, nucleic acid sequencing, single strand conformation polymorphism (SSCP), denaturing gradient gel electrophoresis (DGGE), temperature gradient gel electrophoresis (TGGE), restriction fragment polymorphisms, serial analysis of gene expression (SAGE), or combinations thereof. A biomarker, such as a nucleic acid, can be amplified prior to detection. A biomarker can also be detected by immunoassay, immunoblot, immunoprecipitation, enzyme-linked immunosorbent assay (ELISA; EIA), radioimmunoassay (RIA), flow cytometry, or electron microscopy (EM).

[0116] Biosignatures can be detected using aptamers of the invention that function as either as capture agents and detection agents, as described herein. A capture agent can comprise an antibody, aptamer or other entity which recognizes a biomarker and can be used for capturing the biomarker. Biomarkers that can be captured include circulating biomarkers, e.g., a protein, nucleic acid, lipid or biological complex in solution in a bodily fluid. Similarly, the capture agent can be used for capturing a vesicle. A detection agent can comprise an antibody or other entity which recognizes a biomarker and can be used for detecting the biomarker vesicle, or which recognizes a vesicle and is useful for detecting a vesicle. In some embodiments, the detection agent is labeled and the label is detected, thereby detecting the biomarker or vesicle. The detection agent can be a binding agent, e.g., an antibody or aptamer. In other embodiments, the detection agent comprises a small molecule such as a membrane protein labeling agent. See, e.g., the membrane protein labeling agents disclosed in Alroy et al., US. Patent Publication US 2005/0158708. In an embodiment, vesicles are isolated or captured as described herein, and one or more membrane protein labeling agent is used to detect the vesicles. In many cases, the antigen or other vesicle-moiety that is recognized by the capture and detection agents are interchangeable.

[0117] In a non-limiting embodiment, a vesicle having a cell-of-origin specific antigen on its surface and a cancer-specific antigen on its surface, is captured using a binding agent that is specific to a cells-specific antigen, e.g., by tethering the capture antibody or aptamer to a substrate, and then the vesicle is detected using a binding agent to a disease-specific antigen, e.g., by labeling the binding agent used for detection with a fluorescent dye and detecting the fluorescent radiation emitted by the dye.

[0118] It will be apparent to one of skill in the art that where the target molecule for a binding agent (such as an aptamer of the invention) is informative as to assessing a condition or disease, the same binding agent can be used to both capture a component comprising the target molecule (e.g., microvesicle surface antigen of interest) and also be modified to comprise a detectable label so as to detect the target molecule, e.g., binding agent₁-antigen-binding agent₂*, wherein the * signifies a detectable label; binding agent₁ and binding agent₂ may be the same binding agent or a different binding agent (e.g., same aptamer or different aptamer). In addition, binding agent₁ and binding agent₂ can be selected from wholly different categories of binding agents (e.g., antibody, aptamer, synthetic antibody, peptide-nucleic acid molecule, or any molecule that is configured to specifically bind to or associate with its target molecule). Such binding molecules can be selected solely based on their binding specificity for a target molecule. Examples of additional biomarkers that can be incorporated into the methods and compositions of the invention are known in the art, such as those disclosed in International Patent Publication Nos. WO/2012/174282 (Int'l Appl. PCT/US2012/042519 filed Jun. 14, 2012) and WO/2013/020995 (Int'l Appl. PCT/US2012/050030 filed Aug. 8, 2013). The detectable signal can itself be associated with a nucleic acid molecule that hybridizes with a stretch of nucleic acids present in each oligonucleotide comprising a probing library. The stretch can be the same or different as to one or more oligonucleotides in a library. The detectable signal can comprise fluorescence agents, including color-coded barcodes which are known, such as in U.S. Patent Application Pub. No. 20140371088, 2013017837, and 20120258870.

[0119] Techniques of detecting biomarkers or capturing sample components using an aptamer of the invention include the use of a planar substrate such as an array (e.g., biochip or microarray), with molecules immobilized to the substrate as capture agents that facilitate the detection of a particular biosignature. The array can be provided as part of a kit for assaying one or more biomarkers. Additional examples of binding agents described above and useful in the compositions and methods of the invention are disclosed in International Patent Publication No. WO/2011/127219, entitled “Circulating Biomarkers for Disease” and filed Apr. 6, 2011, which application is incorporated by reference in its entirety herein. Aptamers of the invention can be included in an array for detection and diagnosis of diseases including presymptomatic diseases. In some embodiments, an array comprises a custom array comprising biomolecules selected to specifically identify biomarkers of interest. Customized arrays can be modified to detect biomarkers that increase statistical performance, e.g., additional biomolecules that identifies a biosignature which lead to improved cross-validated error rates in multivariate prediction models (e.g., logistic regression, discriminant analysis, or regression tree models). In some embodiments, customized array(s) are constructed to study the biology of a disease, condition or syndrome and profile biosignatures in defined physiological states. Markers for inclusion on the customized array be chosen based upon statistical criteria, e.g., having a desired level of statistical significance in differentiating between phenotypes or physiological states. In some embodiments, standard significance of p-value=0.05 is chosen to exclude or include biomolecules on the microarray. The p-values can be corrected for multiple comparisons. As an illustrative example, nucleic acids extracted from samples from a subject with or without a disease can be hybridized to a high density microarray that binds to thousands of gene sequences. Nucleic acids whose levels are significantly different between the samples with or without the disease can be selected as biomarkers to distinguish samples as having the disease or not. A customized array can be constructed to detect the selected biomarkers. In some embodiments, customized arrays comprise low density microarrays, which refer to arrays with lower number of addressable binding agents, e.g., tens or hundreds instead of thousands. Low density arrays can be formed on a substrate. In some embodiments, customizable low density arrays use PCR amplification in plate wells, e.g., TaqMan® Gene Expression Assays (Applied Biosystems by Life Technologies Corporation, Carlsbad, Calif.).

[0120] An aptamer of the invention or other useful binding agent may be linked directly or indirectly to a solid surface or substrate. See, e.g., FIGS. 2A-2B, 9, 21A. A solid surface or substrate can be any physically separable solid to which a binding agent can be directly or indirectly attached including, but not limited to, surfaces provided by microarrays and wells, particles such as beads, columns, optical fibers, wipes, glass and modified or functionalized glass, quartz, mica, diazotized membranes (paper or nylon), polyformaldehyde, cellulose, cellulose acetate, paper, ceramics, metals, metalloids, semiconductive materials, quantum dots, coated beads or particles, other chromatographic materials, magnetic particles; plastics (including acrylics, polystyrene, copolymers of styrene or other materials, polypropylene, polyethylene, polybutylene, polyurethanes, Teflon material, etc.), polysaccharides, nylon or nitrocellulose, resins, silica or silica-based materials including silicon and modified silicon, carbon, metals, inorganic glasses, plastics, ceramics, conducting polymers (including polymers such as polypyrole and polyindole); micro or nanostructured surfaces such as nucleic acid tiling arrays, nanotube, nanowire, or nanoparticulate decorated surfaces; or porous surfaces or gels such as methacrylates, acrylamides, sugar polymers, cellulose, silicates, or other fibrous or stranded polymers. In addition, as is known the art, the substrate may be coated using passive or chemically-derivatized coatings with any number of materials, including polymers, such as dextrans, acrylamides, gelatins or agarose. Such coatings can facilitate the use of the array with a biological sample.

[0121] As provided in the examples, below, an aptamer or other useful binding agent can be conjugated to a detectable entity or label.

[0122] Appropriate labels include without limitation a magnetic label, a fluorescent moiety, an enzyme, a chemiluminescent probe, a metal particle, a non-metal colloidal particle, a polymeric dye particle, a pigment molecule, a pigment particle, an electrochemically active species, semiconductor nanocrystal or other nanoparticles including quantum dots or gold particles, fluorophores, quantum dots, or radioactive labels. Protein labels include green fluorescent protein (GFP) and variants thereof (e.g., cyan fluorescent protein and yellow fluorescent protein); and luminescent proteins such as luciferase, as described below. Radioactive labels include without limitation radioisotopes (radionuclides), such as ³H, ¹¹C, ¹⁴C, ¹⁸F, ³²P, ³⁵S, ⁶⁴Cu, ⁶⁸Ga, ⁸⁶Y, ⁹⁹Tc, ¹¹¹In, ¹²³I, ¹²⁴I, ¹²⁵I, ¹³¹I, ¹³³Xe, ¹⁷⁷Lu, ²¹¹At, or ²¹³Bi. Fluorescent labels include without limitation a rare earth chelate (e.g., europium chelate), rhodamine; fluorescein types including without limitation FITC, 5-carboxyfluorescein, 6-carboxy fluorescein; a rhodamine type including without limitation TAMRA; dansyl; Lissamine; cyanines; phycoerythrins; Texas Red; Cy3, Cy5, dapoxyl, NBD, Cascade Yellow, dansyl, PyMPO, pyrene, 7-diethylaminocoumarin-3-carboxylic acid and other coumarin derivatives, Marina Blue™, Pacific Blue™, Cascade Blue™, 2-anthracenesulfonyl, PyMPO, 3,4,9,10-perylene-tetracarboxylic acid, 2,7-difluorofluorescein (Oregon Green™ 488-X), 5-carboxyfluorescein, Texas Red™-X, Alexa Fluor 430, 5-carboxytetramethylrhodamine (5-TAMRA), 6-carboxytetramethylrhodamine (6-TAMRA), BODIPY FL, bimane, and Alexa Fluor 350, 405, 488, 500, 514, 532, 546, 555, 568, 594, 610, 633, 647, 660, 680, 700, and 750, and derivatives thereof, among many others. See, e.g., “The Handbook—A Guide to Fluorescent Probes and Labeling Technologies,” Tenth Edition, available on the internet at probes (dot) invitrogen (dot) com/handbook. The fluorescent label can be one or more of FAM, dRHO, 5-FAM, 6FAM, dR6G, JOE, HEX, VIC, TET, dTAMRA, TAMRA, NED, dROX, PET, BHQ, Gold540 and LIZ.

[0123] Using conventional techniques, an aptamer can be directly or indirectly labeled, e.g., the label is attached to the aptamer through biotin-streptavidin (e.g., synthesize a biotinylated aptamer, which is then capable of binding a streptavidin molecule that is itself conjugated to a detectable label; non-limiting example is streptavidin, phycoerythrin conjugated (SAPE)). Methods for chemical coupling using multiple step procedures include biotinylation, coupling of trinitrophenol (TNP) or digoxigenin using for example succinimide esters of these compounds. Biotinylation can be accomplished by, for example, the use of D-biotinyl-N-hydroxysuccinimide. Succinimide groups react effectively with amino groups at pH values above 7, and preferentially between about pH 8.0 and about pH 8.5. Alternatively, an aptamer is not labeled, but is later contacted with a second antibody that is labeled after the first antibody is bound to an antigen of interest.

[0124] Various enzyme-substrate labels may also be used in conjunction with a composition or method of the invention. Such enzyme-substrate labels are available commercially (e.g., U.S. Pat. No. 4,275,149). The enzyme generally catalyzes a chemical alteration of a chromogenic substrate that can be measured using various techniques. For example, the enzyme may catalyze a color change in a substrate, which can be measured spectrophotometrically. Alternatively, the enzyme may alter the fluorescence or chemiluminescence of the substrate. Examples of enzymatic labels include luciferases (e.g., firefly luciferase and bacterial luciferase; U.S. Pat. No. 4,737,456), luciferin, 2,3-dihydrophthalazinediones, malate dehydrogenase, urease, peroxidase such as horseradish peroxidase (HRP), alkaline phosphatase (AP), β-galactosidase, glucoamylase, lysozyme, saccharide oxidases (e.g., glucose oxidase, galactose oxidase, and glucose-6-phosphate dehydrogenase), heterocyclic oxidases (such as uricase and xanthine oxidase), lactoperoxidase, microperoxidase, and the like. Examples of enzyme-substrate combinations include, but are not limited to, horseradish peroxidase (HRP) with hydrogen peroxidase as a substrate, wherein the hydrogen peroxidase oxidizes a dye precursor (e.g., orthophenylene diamine (OPD) or 3,3′,5,5′-tetramethylbenzidine hydrochloride (TMB)); alkaline phosphatase (AP) with para-nitrophenyl phosphate as chromogenic substrate; and β-D-galactosidase (β-D-Gal) with a chromogenic substrate (e.g., p-nitrophenyl-β-D-galactosidase) or fluorogenic substrate 4-methylumbelliferyl-β-D-galactosidase.

[0125] Aptamer(s) can be linked to a substrate such as a planar substrate. A planar array generally contains addressable locations (e.g., pads, addresses, or micro-locations) of biomolecules in an array format. The size of the array will depend on the composition and end use of the array. Arrays can be made containing from 2 different molecules to many thousands. Generally, the array comprises from two to as many as 100,000 or more molecules, depending on the end use of the array and the method of manufacture. A microarray for use with the invention comprises at least one biomolecule that identifies or captures a biomarker present in a biosignature of interest, e.g., a microRNA or other biomolecule or vesicle that makes up the biosignature. In some arrays, multiple substrates are used, either of different or identical compositions. Accordingly, planar arrays may comprise a plurality of smaller substrates.

[0126] The present invention can make use of many types of arrays for detecting a biomarker, e.g., a biomarker associated with a biosignature of interest. Useful arrays or microarrays include without limitation DNA microarrays, such as cDNA microarrays, oligonucleotide microarrays and SNP microarrays, microRNA arrays, protein microarrays, antibody microarrays, tissue microarrays, cellular microarrays (also called transfection microarrays), chemical compound microarrays, and carbohydrate arrays (glycoarrays). These arrays are described in more detail above. In some embodiments, microarrays comprise biochips that provide high-density immobilized arrays of recognition molecules (e.g., aptamers or antibodies), where biomarker binding is monitored indirectly (e.g., via fluorescence).

[0127] An array or microarray that can be used to detect one or more biomarkers of a biosignature and comprising one or more aptamers of the invention can be made according to the methods described in U.S. Pat. Nos. 6,329,209; 6,365,418; 6,406,921; 6,475,808; and 6,475,809, and U.S. patent application Ser. No. 10/884,269, each of which is herein incorporated by reference in its entirety. Custom arrays to detect specific selections of sets of biomarkers described herein can be made using the methods described in these patents. Commercially available microarrays can also be used to carry out the methods of the invention, including without limitation those from Affymetrix (Santa Clara, Calif.), Illumina (San Diego, Calif.), Agilent (Santa Clara, Calif.), Exiqon (Denmark), or Invitrogen (Carlsbad, Calif.). Custom and/or commercial arrays include arrays for detection proteins, nucleic acids, and other biological molecules and entities (e.g., cells, vesicles, virii) as described herein.

[0128] In some embodiments, multiple capture molecules are disposed on an array, e.g., proteins, peptides or additional nucleic acid molecules. In certain embodiments, the proteins are immobilized using methods and materials that minimize the denaturing of the proteins, that minimize alterations in the activity of the proteins, or that minimize interactions between the protein and the surface on which they are immobilized. The capture molecules can comprise one or more aptamer of the invention. In one embodiment, an array is constructed for the hybridization of a pool of aptamers. The array can then be used to identify pool members that bind a sample, thereby facilitating characterization of a phenotype. See FIGS. 19B-19C and related disclosure for further details.

[0129] Array surfaces useful may be of any desired shape, form, or size. Non-limiting examples of surfaces include chips, continuous surfaces, curved surfaces, flexible surfaces, films, plates, sheets, or tubes. Surfaces can have areas ranging from approximately a square micron to approximately 500 cm². The area, length, and width of surfaces may be varied according to the requirements of the assay to be performed. Considerations may include, for example, ease of handling, limitations of the material(s) of which the surface is formed, requirements of detection systems, requirements of deposition systems (e.g., arrayers), or the like.

[0130] In certain embodiments, it is desirable to employ a physical means for separating groups or arrays of binding islands or immobilized biomolecules: such physical separation facilitates exposure of different groups or arrays to different solutions of interest. Therefore, in certain embodiments, arrays are situated within microwell plates having any number of wells. In such embodiments, the bottoms of the wells may serve as surfaces for the formation of arrays, or arrays may be formed on other surfaces and then placed into wells. In certain embodiments, such as where a surface without wells is used, binding islands may be formed or molecules may be immobilized on a surface and a gasket having holes spatially arranged so that they correspond to the islands or biomolecules may be placed on the surface. Such a gasket is preferably liquid tight. A gasket may be placed on a surface at any time during the process of making the array and may be removed if separation of groups or arrays is no longer desired.

[0131] In some embodiments, the immobilized molecules can bind to one or more biomarkers or vesicles present in a biological sample contacting the immobilized molecules. In some embodiments, the immobilized molecules modify or are modified by molecules present in the one or more vesicles contacting the immobilized molecules. Contacting the sample typically comprises overlaying the sample upon the array.

[0132] Modifications or binding of molecules in solution or immobilized on an array can be detected using detection techniques known in the art. Examples of such techniques include immunological techniques such as competitive binding assays and sandwich assays; fluorescence detection using instruments such as confocal scanners, confocal microscopes, or CCD-based systems and techniques such as fluorescence, fluorescence polarization (FP), fluorescence resonant energy transfer (FRET), total internal reflection fluorescence (TIRF), fluorescence correlation spectroscopy (FCS); colorimetric/spectrometric techniques; surface plasmon resonance, by which changes in mass of materials adsorbed at surfaces are measured; techniques using radioisotopes, including conventional radioisotope binding and scintillation proximity assays (SPA); mass spectroscopy, such as matrix-assisted laser desorption/ionization mass spectroscopy (MALDI) and MALDI-time of flight (TOF) mass spectroscopy; ellipsometry, which is an optical method of measuring thickness of protein films; quartz crystal microbalance (QCM), a very sensitive method for measuring mass of materials adsorbing to surfaces; scanning probe microscopies, such as atomic force microscopy (AFM), scanning force microscopy (SFM) or scanning electron microscopy (SEM); and techniques such as electrochemical, impedance, acoustic, microwave, and IR/Raman detection. See, e.g., Mere L, et al., “Miniaturized FRET assays and microfluidics: key components for ultra-high-throughput screening,” Drug Discovery Today 4(8):363-369 (1999), and references cited therein; Lakowicz J R, Principles of Fluorescence Spectroscopy, 2nd Edition, Plenum Press (1999), or Jain K K: Integrative Omics, Pharmacoproteomics, and Human Body Fluids. In: Thongboonkerd V, ed., ed. Proteomics of Human Body Fluids: Principles, Methods and Applications. Volume 1: Totowa, N.J.: Humana Press, 2007, each of which is herein incorporated by reference in its entirety.

[0133] Microarray technology can be combined with mass spectroscopy (MS) analysis and other tools. Electrospray interface to a mass spectrometer can be integrated with a capillary in a microfluidics device. For example, one commercially available system contains eTag reporters that are fluorescent labels with unique and well-defined electrophoretic mobilities; each label is coupled to biological or chemical probes via cleavable linkages. The distinct mobility address of each eTag reporter allows mixtures of these tags to be rapidly deconvoluted and quantitated by capillary electrophoresis. This system allows concurrent gene expression, protein expression, and protein function analyses from the same sample Jain K K: Integrative Omics, Pharmacoproteomics, and Human Body Fluids. In: Thongboonkerd V, ed., ed. Proteomics of Human Body Fluids: Principles, Methods and Applications. Volume 1: Totowa, N.J.: Humana Press, 2007, which is herein incorporated by reference in its entirety.

[0134] A biochip can include components for a microfluidic or nanofluidic assay. A microfluidic device can be used for isolating or analyzing biomarkers, such as determining a biosignature. Microfluidic systems allow for the miniaturization and compartmentalization of one or more processes for isolating, capturing or detecting a vesicle, detecting a microRNA, detecting a circulating biomarker, detecting a biosignature, and other processes. The microfluidic devices can use one or more detection reagents in at least one aspect of the system, and such a detection reagent can be used to detect one or more biomarkers. In one embodiment, the device detects a biomarker on an isolated or bound vesicle. Various probes, antibodies, proteins, or other binding agents can be used to detect a biomarker within the microfluidic system. The detection agents may be immobilized in different compartments of the microfluidic device or be entered into a hybridization or detection reaction through various channels of the device.

[0135] A vesicle in a microfluidic device can be lysed and its contents detected within the microfluidic device, such as proteins or nucleic acids, e.g., DNA or RNA such as miRNA or mRNA. The nucleic acid may be amplified prior to detection, or directly detected, within the microfluidic device. Thus microfluidic system can also be used for multiplexing detection of various biomarkers. In an embodiment, vesicles are captured within the microfluidic device, the captured vesicles are lysed, and a biosignature of microRNA from the vesicle payload is determined. The biosignature can further comprise the capture agent used to capture the vesicle.

[0136] Novel nanofabrication techniques are opening up the possibilities for biosensing applications that rely on fabrication of high-density, precision arrays, e.g., nucleotide-based chips and protein arrays otherwise known as heterogeneous nanoarrays. Nanofluidics allows a further reduction in the quantity of fluid analyte in a microchip to nanoliter levels, and the chips used here are referred to as nanochips. See, e.g., Unger M et al., Biotechniques 1999; 27(5):1008-14, Kartalov E P et al., Biotechniques 2006; 40(1):85-90, each of which are herein incorporated by reference in their entireties. Commercially available nanochips currently provide simple one step assays such as total cholesterol, total protein or glucose assays that can be run by combining sample and reagents, mixing and monitoring of the reaction. Gel-free analytical approaches based on liquid chromatography (LC) and nanoLC separations (Cutillas et al. Proteomics, 2005; 5:101-112 and Cutillas et al., Mol Cell Proteomics 2005; 4:1038-1051, each of which is herein incorporated by reference in its entirety) can be used in combination with the nanochips.

[0137] An array suitable for identifying a disease, condition, syndrome or physiological status can be included in a kit. A kit can include, an aptamer of the invention, including as non-limiting examples, one or more reagents useful for preparing molecules for immobilization onto binding islands or areas of an array, reagents useful for detecting binding of a vesicle to immobilized molecules, and instructions for use.

[0138] Further provided herein is a rapid detection device that facilitates the detection of a particular biosignature in a biological sample. The device can integrate biological sample preparation with polymerase chain reaction (PCR) on a chip. The device can facilitate the detection of a particular biosignature of a vesicle in a biological sample, and an example is provided as described in Pipper et al., Angewandte Chemie, 47(21), p. 3900-3904 (2008), which is herein incorporated by reference in its entirety. A biosignature can be incorporated using micro-/nano-electrochemical system (MEMS/NEMS) sensors and oral fluid for diagnostic applications as described in Li et al., Adv Dent Res 18(1): 3-5 (2005), which is herein incorporated by reference in its entirety.

[0139] Particle Arrays

[0140] As an alternative to planar arrays, assays using particles, such as bead based assays are also capable of use with an aptamer of the invention. Aptamers are easily conjugated with commercially available beads. See, e.g., Srinivas et al. Anal. Chem. 2011 Oct. 21, Aptamer functionalized Microgel Particles for Protein Detection; See also, review article on aptamers as therapeutic and diagnostic agents, Brody and Gold, Rev. Mol. Biotech. 2000, 74:5-13.

[0141] Multiparametric assays or other high throughput detection assays using bead coatings with cognate ligands and reporter molecules with specific activities consistent with high sensitivity automation can be used. In a bead based assay system, a binding agent for a biomarker or vesicle, such as a capture agent (e.g. capture antibody), can be immobilized on an addressable microsphere. Each binding agent for each individual binding assay can be coupled to a distinct type of microsphere (i.e., microbead) and the assay reaction takes place on the surface of the microsphere, such as depicted in FIG. 2B. A binding agent for a vesicle can be a capture antibody coupled to a bead. Dyed microspheres with discrete fluorescence intensities are loaded separately with their appropriate binding agent or capture probes. The different bead sets carrying different binding agents can be pooled as desired to generate custom bead arrays. Bead arrays are then incubated with the sample in a single reaction vessel to perform the assay.

[0142] Bead-based assays can also be used with one or more aptamers of the invention. A bead substrate can provide a platform for attaching one or more binding agents, including aptamer(s). For multiplexing, multiple different bead sets (e.g., Illumina, Luminex) can have different binding agents (specific to different target molecules). For example, a bead can be conjugated to an aptamer of the invention used to detect the presence (quantitatively or qualitatively) of an antigen of interest, or it can also be used to isolate a component present in a selected biological sample (e.g., cell, cell-fragment or vesicle comprising the target molecule to which the aptamer is configured to bind or associate). Any molecule of organic origin can be successfully conjugated to a polystyrene bead through use of commercially available kits.

[0143] One or more aptamers of the invention can be used with any bead based substrate, including but not limited to magnetic capture method, fluorescence activated cell sorting (FACS) or laser cytometry. Magnetic capture methods can include, but are not limited to, the use of magnetically activated cell sorter (MACS) microbeads or magnetic columns. Examples of bead or particle based methods that can be modified to use an aptamer of the invention include methods and bead systems described in U.S. Pat. No. 4,551,435, 4,795,698, 4,925,788, 5,108,933, 5,186,827, 5,200,084 or 5,158,871; 7,399,632; 8,124,015; 8,008,019; 7,955,802; 7,445,844; 7,274,316; 6,773,812; 6,623,526; 6,599,331; 6,057,107; 5,736,330; International Patent Publication No. WO/2012/174282; WO/1993/022684.

[0144] Flow Cytometry

[0145] Isolation or detection of circulating biomarkers, e.g., protein antigens, from a biological sample, or of the biomarker-comprising cells, cell fragments or vesicles may also be achieved using an aptamer of the invention in a cytometry process. As a non-limiting example, aptamers of the invention can be used in an assay comprising using a particle such as a bead or microsphere The invention provides aptamers as binding agents, which may be conjugated to the particle. Flow cytometry can be used for sorting microscopic particles suspended in a stream of fluid. As particles pass through they can be selectively charged and on their exit can be deflected into separate paths of flow. It is therefore possible to separate populations from an original mix, such as a biological sample, with a high degree of accuracy and speed. Flow cytometry allows simultaneous multiparametric analysis of the physical and/or chemical characteristics of single cells flowing through an optical/electronic detection apparatus. A beam of light, usually laser light, of a single frequency (color) is directed onto a hydrodynamically focused stream of fluid. A number of detectors are aimed at the point where the stream passes through the light beam; one in line with the light beam (Forward Scatter or FSC) and several perpendicular to it (Side Scatter or SSC) and one or more fluorescent detectors.

[0146] Each suspended particle passing through the beam scatters the light in some way, and fluorescent chemicals in the particle may be excited into emitting light at a lower frequency than the light source. This combination of scattered and fluorescent light is picked up by the detectors, and by analyzing fluctuations in brightness at each detector (one for each fluorescent emission peak), it is possible to deduce various facts about the physical and chemical structure of each individual particle. FSC correlates with the cell size and SSC depends on the inner complexity of the particle, such as shape of the nucleus, the amount and type of cytoplasmic granules or the membrane roughness. Some flow cytometers have eliminated the need for fluorescence and use only light scatter for measurement.

[0147] Flow cytometers can analyze several thousand particles every second in “real time” and can actively separate out and isolate particles having specified properties. They offer high-throughput automated quantification, and separation, of the set parameters for a high number of single cells during each analysis session. Flow cytometers can have multiple lasers and fluorescence detectors, allowing multiple labels to be used to more precisely specify a target population by their phenotype. Thus, a flow cytometer, such as a multicolor flow cytometer, can be used to detect one or more vesicles with multiple fluorescent labels or colors. In some embodiments, the flow cytometer can also sort or isolate different vesicle populations, such as by size or by different markers.

[0148] The flow cytometer may have one or more lasers, such as 1, 2, 3, 4, 5, 6, 7, 8, 9, 10 or more lasers. In some embodiments, the flow cytometer can detect more than one color or fluorescent label, such as at least 2, 3, 4, 5, 6, 7, 8, 9, 10, 11, 12, 13, 14, 15, 16, 17, 18, 19, or 20 different colors or fluorescent labels. For example, the flow cytometer can have at least 2, 3, 4, 5, 6, 7, 8, 9, 10, 11, 12, 13, 14, 15, 16, 17, 18, 19, or 20 fluorescence detectors.

[0149] Examples of commercially available flow cytometers that can be used to detect or analyze one or more vesicles, to sort or separate different populations of vesicles, include, but are not limited to the MoFlo™ XDP Cell Sorter (Beckman Coulter, Brea, Calif.), MoFlo™ Legacy Cell Sorter (Beckman Coulter, Brea, Calif.), BD FACSAria™ Cell Sorter (BD Biosciences, San Jose, Calif.), BD™ LSRII (BD Biosciences, San Jose, Calif.), and BD FACSCalibur™ (BD Biosciences, San Jose, Calif.). Use of multicolor or multi-fluor cytometers can be used in multiplex analysis of vesicles, as further described below. In some embodiments, the flow cytometer can sort, and thereby collect or sort more than one population of vesicles based one or more characteristics. For example, two populations of vesicles differ in size, such that the vesicles within each population have a similar size range and can be differentially detected or sorted. In another embodiment, two different populations of vesicles are differentially labeled.

[0150] The data resulting from flow-cytometers can be plotted in 1 dimension to produce histograms or seen in 2 dimensions as dot plots or in 3 dimensions with newer software. The regions on these plots can be sequentially separated by a series of subset extractions which are termed gates. Specific gating protocols exist for diagnostic and clinical purposes especially in relation to hematology. The plots are often made on logarithmic scales. Because different fluorescent dye's emission spectra overlap, signals at the detectors have to be compensated electronically as well as computationally. Fluorophores for labeling biomarkers may include those described in Ormerod, Flow Cytometry 2nd ed., Springer-Verlag, New York (1999), and in Nida et al., Gynecologic Oncology 2005; 4 889-894 which is incorporated herein by reference. In a multiplexed assay, including but not limited to a flow cytometry assay, one or more different target molecules can be assessed, wherein at least one of the target molecules is a microvesicle surface antigen assessed using an aptamer of the invention.

[0151] Microfluidics

[0152] One or more aptamer of the invention can be disposed on any useful planar or bead substrate. In one aspect of the invention one or more aptamer of the invention is disposed on a microfluidic device, thereby facilitating assessing, characterizing or isolating a component of a biological sample comprising a polypeptide antigen of interest or a functional fragment thereof. For example, the circulating antigen or a cell, cell fragment or cell-derived vesicles comprising the antigen can be assessed using one or more aptamers of the invention (alternatively along with additional binding agents). Microfluidic devices, which may also be referred to as “lab-on-a-chip” systems, biomedical micro-electro-mechanical systems (bioMEMs), or multicomponent integrated systems, can be used for isolating and analyzing a vesicle. Such systems miniaturize and compartmentalize processes that allow for binding of vesicles, detection of biosignatures, and other processes.

[0153] A microfluidic device can also be used for isolation of a vesicle through size differential or affinity selection. For example, a microfluidic device can use one more channels for isolating a vesicle from a biological sample based on size or by using one or more binding agents for isolating a vesicle from a biological sample. A biological sample can be introduced into one or more microfluidic channels, which selectively allows the passage of a vesicle. The selection can be based on a property of the vesicle, such as the size, shape, deformability, or biosignature of the vesicle.

[0154] In one embodiment, a heterogeneous population of vesicles can be introduced into a microfluidic device, and one or more different homogeneous populations of vesicles can be obtained. For example, different channels can have different size selections or binding agents to select for different vesicle populations. Thus, a microfluidic device can isolate a plurality of vesicles wherein at least a subset of the plurality of vesicles comprises a different biosignature from another subset of the plurality of vesicles. For example, the microfluidic device can isolate at least 2, 3, 4, 5, 6, 7, 8, 9, 10, 15, 20, 25, 30, 40, 50, 60, 70, 80, 90, or 100 different subsets of vesicles, wherein each subset of vesicles comprises a different biosignature.

[0155] In some embodiments, the microfluidic device can comprise one or more channels that permit further enrichment or selection of a vesicle. A population of vesicles that has been enriched after passage through a first channel can be introduced into a second channel, which allows the passage of the desired vesicle or vesicle population to be further enriched, such as through one or more binding agents present in the second channel.

[0156] Array-based assays and bead-based assays can be used with microfluidic device. For example, the binding agent can be coupled to beads and the binding reaction between the beads and vesicle can be performed in a microfluidic device. Multiplexing can also be performed using a microfluidic device. Different compartments can comprise different binding agents for different populations of vesicles, where each population is of a different cell-of-origin specific vesicle population. In one embodiment, each population has a different biosignature. The hybridization reaction between the microsphere and vesicle can be performed in a microfluidic device and the reaction mixture can be delivered to a detection device. The detection device, such as a dual or multiple laser detection system can be part of the microfluidic system and can use a laser to identify each bead or microsphere by its color-coding, and another laser can detect the hybridization signal associated with each bead.

[0157] Any appropriate microfluidic device can be used in the methods of the invention. Examples of microfluidic devices that may be used, or adapted for use with vesicles, include but are not limited to those described in U.S. Pat. Nos. 7,591,936, 7,581,429, 7,579,136, 7,575,722, 7,568,399, 7,552,741, 7,544,506, 7,541,578, 7,518,726, 7,488,596, 7,485,214, 7,467,928, 7,452,713, 7,452,509, 7,449,096, 7,431,887, 7,422,725, 7,422,669, 7,419,822, 7,419,639, 7,413,709, 7,411,184, 7,402,229, 7,390,463, 7,381,471, 7,357,864, 7,351,592, 7,351,380, 7,338,637, 7,329,391, 7,323,140, 7,261,824, 7,258,837, 7,253,003, 7,238,324, 7,238,255, 7,233,865, 7,229,538, 7,201,881, 7,195,986, 7,189,581, 7,189,580, 7,189,368, 7,141,978, 7,138,062, 7,135,147, 7,125,711, 7,118,910, 7,118,661, 7,640,947, 7,666,361, 7,704,735; and International Patent Publication WO 2010/072410; each of which patents or applications are incorporated herein by reference in their entirety. Another example for use with methods disclosed herein is described in Chen et al., “Microfluidic isolation and transcriptome analysis of serum vesicles,” Lab on a Chip, Dec. 8, 2009 DO: 10.1039/b916199f.

[0158] Other microfluidic devices for use with the invention include devices comprising elastomeric layers, valves and pumps, including without limitation those disclosed in U.S. Pat. Nos. 5,376,252, 6,408,878, 6,645,432, 6,719,868, 6,793,753, 6,899,137, 6,929,030, 7,040,338, 7,118,910, 7,144,616, 7,216,671, 7,250,128, 7,494,555, 7,501,245, 7,601,270, 7,691,333, 7,754,010, 7,837,946; U.S. Patent Application Nos. 2003/0061687, 2005/0084421, 2005/0112882, 2005/0129581, 2005/0145496, 2005/0201901, 2005/0214173, 2005/0252773, 2006/0006067; and EP Patent Nos. 0527905 and 1065378; each of which application is herein incorporated by reference. In some instances, much or all of the devices are composed of elastomeric material. Certain devices are designed to conduct thermal cycling reactions (e.g., PCR) with devices that include one or more elastomeric valves to regulate solution flow through the device. The devices can comprise arrays of reaction sites thereby allowing a plurality of reactions to be performed. Thus, the devices can be used to assess circulating microRNAs in a multiplex fashion, including microRNAs isolated from vesicles. In an embodiment, the microfluidic device comprises (a) a first plurality of flow channels formed in an elastomeric substrate; (b) a second plurality of flow channels formed in the elastomeric substrate that intersect the first plurality of flow channels to define an array of reaction sites, each reaction site located at an intersection of one of the first and second flow channels; (c) a plurality of isolation valves disposed along the first and second plurality of flow channels and spaced between the reaction sites that can be actuated to isolate a solution within each of the reaction sites from solutions at other reaction sites, wherein the isolation valves comprise one or more control channels that each overlay and intersect one or more of the flow channels; and (d) means for simultaneously actuating the valves for isolating the reaction sites from each other. Various modifications to the basic structure of the device are envisioned within the scope of the invention. MicroRNAs can be detected in each of the reaction sites by using PCR methods. For example, the method can comprise the steps of the steps of: (i) providing a microfluidic device, the microfluidic device comprising: a first fluidic channel having a first end and a second end in fluid communication with each other through the channel; a plurality of flow channels, each flow channel terminating at a terminal wall; wherein each flow channel branches from and is in fluid communication with the first fluidic channel, wherein an aqueous fluid that enters one of the flow channels from the first fluidic channel can flow out of the flow channel only through the first fluidic channel; and, an inlet in fluid communication with the first fluidic channel, the inlet for introducing a sample fluid; wherein each flow channel is associated with a valve that when closed isolates one end of the flow channel from the first fluidic channel, whereby an isolated reaction site is formed between the valve and the terminal wall; a control channel; wherein each the valve is a deflectable membrane which is deflected into the flow channel associated with the valve when an actuating force is applied to the control channel, thereby closing the valve; and wherein when the actuating force is applied to the control channel a valve in each of the flow channels is closed, so as to produce the isolated reaction site in each flow channel; (ii) introducing the sample fluid into the inlet, the sample fluid filling the flow channels; (iii) actuating the valve to separate the sample fluid into the separate portions within the flow channels; (iv) amplifying the nucleic acid in the sample fluid; (v) analyzing the portions of the sample fluid to determine whether the amplifying produced the reaction. The sample fluid can contain an amplifiable nucleic acid target, e.g., a microRNA, and the conditions can be polymerase chain reaction (PCR) conditions, so that the reaction results in a PCR product being formed.

[0159] The microfluidic device can have one or more binding agents attached to a surface in a channel, or present in a channel. For example, the microchannel can have one or more capture agents, such as a capture agent for a tissue related antigen in Table 4, one or more general microvesicle antigen in Table 3 or a cell-of-origin or cancer related antigen in Table 4, including without limitation EpCam, CD9, CD63, CD81, B7H3, ICAM, STEAP, KLK2, SSX2, SSX4, PBP, SPDEF, and EGFR. The capture agent may be an aptamer selected by the methods of the invention. The surface of the channel can also be contacted with a blocking aptamer. In one embodiment, a microchannel surface is treated with avidin and a capture agent, such as an antibody, that is biotinylated can be injected into the channel to bind the avidin. In other embodiments, the capture agents are present in chambers or other components of a microfluidic device. The capture agents can also be attached to beads that can be manipulated to move through the microfluidic channels. In one embodiment, the capture agents are attached to magnetic beads. The beads can be manipulated using magnets.

[0160] A biological sample can be flowed into the microfluidic device, or a microchannel, at rates such as at least about 1, 2, 3, 4, 5, 6, 7, 8, 9, 10, 11, 12, 13, 14, 15, 16, 17, 18, 19, 20, 25, 30, 35, 40, 45, or 50 μl per minute, such as between about 1-50, 5-40, 5-30, 3-20 or 5-15 μl per minute. One or more vesicles can be captured and directly detected in the microfluidic device. Alternatively, the captured vesicle may be released and exit the microfluidic device prior to analysis. In another embodiment, one or more captured vesicles are lysed in the microchannel and the lysate can be analyzed, e.g., to examine payload within the vesicles. Lysis buffer can be flowed through the channel and lyse the captured vesicles. For example, the lysis buffer can be flowed into the device or microchannel at rates such as at least about a, 2, 3, 4, 5, 6, 7, 8, 9, 10, 11, 12, 13, 14, 15, 16, 17, 18, 19, 20, 25, 26, 27, 28, 29, 30, 35, 40, 45, or 50 μl per minute, such as between about 1-50, 5-40, 10-30, 5-30 or 10-35 μl per minute. The lysate can be collected and analyzed, such as performing RT-PCR, PCR, mass spectrometry, Western blotting, or other assays, to detect one or more biomarkers of the vesicle.

### Phenotypes

[0161] Disclosed herein are products and processes for characterizing a phenotype using the methods and compositions of the invention. The term “phenotype” as used herein can mean any trait or characteristic that is attributed to a biomarker profile that is identified using in part or in whole the compositions and/or methods of the invention. For example, a phenotype can be a diagnostic, prognostic or theranostic determination based on a characterized biomarker profile for a sample obtained from a subject. A phenotype can be any observable characteristic or trait of, such as a disease or condition, a stage of a disease or condition, susceptibility to a disease or condition, prognosis of a disease stage or condition, a physiological state, or response/potential response to therapeutics. A phenotype can result from a subject's genetic makeup as well as the influence of environmental factors and the interactions between the two, as well as from epigenetic modifications to nucleic acid sequences.

[0162] A phenotype in a subject can be characterized by obtaining a biological sample from a subject and analyzing the sample using the compositions and/or methods of the invention. For example, characterizing a phenotype for a subject or individual can include detecting a disease or condition (including presymptomatic early stage detecting), determining a prognosis, diagnosis, or theranosis of a disease or condition, or determining the stage or progression of a disease or condition. Characterizing a phenotype can include identifying appropriate treatments or treatment efficacy for specific diseases, conditions, disease stages and condition stages, predictions and likelihood analysis of disease progression, particularly disease recurrence, metastatic spread or disease relapse. A phenotype can also be a clinically distinct type or subtype of a condition or disease, such as a cancer or tumor. Phenotype determination can also be a determination of a physiological condition, or an assessment of organ distress or organ rejection, such as post-transplantation. The compositions and methods described herein allow assessment of a subject on an individual basis, which can provide benefits of more efficient and economical decisions in treatment.

[0163] In an aspect, the invention relates to the analysis of biomarkers such as microvesicles to provide a diagnosis, prognosis, and/or theranosis of a disease or condition. Theranostics includes diagnostic testing that provides the ability to affect therapy or treatment of a disease or disease state. Theranostics testing provides a theranosis in a similar manner that diagnostics or prognostic testing provides a diagnosis or prognosis, respectively. As used herein, theranostics encompasses any desired form of therapy related testing, including predictive medicine, personalized medicine, integrated medicine, pharmacodiagnostics and Dx/Rx partnering. Therapy related tests can be used to predict and assess drug response in individual subjects, i.e., to provide personalized medicine. Predicting a drug response can be determining whether a subject is a likely responder or a likely non-responder to a candidate therapeutic agent, e.g., before the subject has been exposed or otherwise treated with the treatment. Assessing a drug response can be monitoring a response to a drug, e.g., monitoring the subject's improvement or lack thereof over a time course after initiating the treatment. Therapy related tests are useful to select a subject for treatment who is particularly likely to benefit from the treatment or to provide an early and objective indication of treatment efficacy in an individual subject. Thus, analysis using the compositions and methods of the invention may indicate that treatment should be altered to select a more promising treatment, thereby avoiding the great expense of delaying beneficial treatment and avoiding the financial and morbidity costs of administering an ineffective drug(s).

[0164] Thus, the compositions and methods of the invention may help predict whether a subject is likely to respond to a treatment for a disease or disorder. Characterizing a phenotype includes predicting the responder/non-responder status of the subject, wherein a responder responds to a treatment for a disease and a non-responder does not respond to the treatment. Biomarkers such as microvesicles can be analyzed in the subject and compared against that of previous subjects that were known to respond or not to a treatment. If the biomarker profile in the subject more closely aligns with that of previous subjects that were known to respond to the treatment, the subject can be characterized, or predicted, as a responder to the treatment. Similarly, if the biomarker profile in the subject more closely aligns with that of previous subjects that did not respond to the treatment, the subject can be characterized, or predicted as a non-responder to the treatment. The treatment can be for any appropriate disease, disorder or other condition, including without limitation those disclosed herein.

[0165] In some embodiments, the phenotype comprises a disease or condition such as those listed in Tables 1 or 16. For example, the phenotype can comprise detecting the presence of or likelihood of developing a tumor, neoplasm, or cancer, or characterizing the tumor, neoplasm, or cancer (e.g., stage, grade, aggressiveness, likelihood of metastatis or recurrence, etc). Cancers that can be detected or assessed by methods or compositions described herein include, but are not limited to, breast cancer, ovarian cancer, lung cancer, colon cancer, hyperplastic polyp, adenoma, colorectal cancer, high grade dysplasia, low grade dysplasia, prostatic hyperplasia, prostate cancer, melanoma, pancreatic cancer, brain cancer (such as a glioblastoma), hematological malignancy, hepatocellular carcinoma, cervical cancer, endometrial cancer, head and neck cancer, esophageal cancer, gastrointestinal stromal tumor (GIST), renal cell carcinoma (RCC) or gastric cancer. The colorectal cancer can be CRC Dukes B or Dukes C-D. The hematological malignancy can be B-Cell Chronic Lymphocytic Leukemia, B-Cell Lymphoma-DLBCL, B-Cell Lymphoma-DLBCL-germinal center-like, B-Cell Lymphoma-DLBCL-activated B-cell-like, and Burkitt's lymphoma.

[0166] The phenotype can be a premalignant condition, such as actinic keratosis, atrophic gastritis, leukoplakia, erythroplasia, Lymphomatoid Granulomatosis, preleukemia, fibrosis, cervical dysplasia, uterine cervical dysplasia, xeroderma pigmentosum, Barrett's Esophagus, colorectal polyp, or other abnormal tissue growth or lesion that is likely to develop into a malignant tumor. Transformative viral infections such as HIV and HPV also present phenotypes that can be assessed according to the invention.

[0167] A cancer characterized by the methods of the invention can comprise, without limitation, a carcinoma, a sarcoma, a lymphoma or leukemia, a germ cell tumor, a blastoma, or other cancers. Carcinomas include without limitation epithelial neoplasms, squamous cell neoplasms squamous cell carcinoma, basal cell neoplasms basal cell carcinoma, transitional cell papillomas and carcinomas, adenomas and adenocarcinomas (glands), adenoma, adenocarcinoma, linitis plastica insulinoma, glucagonoma, gastrinoma, vipoma, cholangiocarcinoma, hepatocellular carcinoma, adenoid cystic carcinoma, carcinoid tumor of appendix, prolactinoma, oncocytoma, hurthle cell adenoma, renal cell carcinoma, grawitz tumor, multiple endocrine adenomas, endometrioid adenoma, adnexal and skin appendage neoplasms, mucoepidermoid neoplasms, cystic, mucinous and serous neoplasms, cystadenoma, pseudomyxoma peritonei, ductal, lobular and medullary neoplasms, acinar cell neoplasms, complex epithelial neoplasms, warthin's tumor, thymoma, specialized gonadal neoplasms, sex cord stromal tumor, thecoma, granulosa cell tumor, arrhenoblastoma, sertoli leydig cell tumor, glomus tumors, paraganglioma, pheochromocytoma, glomus tumor, nevi and melanomas, melanocytic nevus, malignant melanoma, melanoma, nodular melanoma, dysplastic nevus, lentigo maligna melanoma, superficial spreading melanoma, and malignant acral lentiginous melanoma. Sarcoma includes without limitation Askin's tumor, botryodies, chondrosarcoma, Ewing's sarcoma, malignant hemangio endothelioma, malignant schwannoma, osteosarcoma, soft tissue sarcomas including: alveolar soft part sarcoma, angiosarcoma, cystosarcoma phyllodes, dermatofibrosarcoma, desmoid tumor, desmoplastic small round cell tumor, epithelioid sarcoma, extraskeletal chondrosarcoma, extraskeletal osteosarcoma, fibrosarcoma, hemangiopericytoma, hemangiosarcoma, kaposi's sarcoma, leiomyosarcoma, liposarcoma, lymphangiosarcoma, lymphosarcoma, malignant fibrous histiocytoma, neurofibrosarcoma, rhabdomyosarcoma, and synovialsarcoma. Lymphoma and leukemia include without limitation chronic lymphocytic leukemia/small lymphocytic lymphoma, B-cell prolymphocytic leukemia, lymphoplasmacytic lymphoma (such as waldenstrom macroglobulinemia), splenic marginal zone lymphoma, plasma cell myeloma, plasmacytoma, monoclonal immunoglobulin deposition diseases, heavy chain diseases, extranodal marginal zone B cell lymphoma, also called malt lymphoma, nodal marginal zone B cell lymphoma (nmzl), follicular lymphoma, mantle cell lymphoma, diffuse large B cell lymphoma, mediastinal (thymic) large B cell lymphoma, intravascular large B cell lymphoma, primary effusion lymphoma, burkitt lymphoma/leukemia, T cell prolymphocytic leukemia, T cell large granular lymphocytic leukemia, aggressive NK cell leukemia, adult T cell leukemia/lymphoma, extranodal NK/T cell lymphoma, nasal type, enteropathy-type T cell lymphoma, hepatosplenic T cell lymphoma, blastic NK cell lymphoma, mycosis fungoides/sezary syndrome, primary cutaneous CD30-positive T cell lymphoproliferative disorders, primary cutaneous anaplastic large cell lymphoma, lymphomatoid papulosis, angioimmunoblastic T cell lymphoma, peripheral T cell lymphoma, unspecified, anaplastic large cell lymphoma, classical hodgkin lymphomas (nodular sclerosis, mixed cellularity, lymphocyte-rich, lymphocyte depleted or not depleted), and nodular lymphocyte-predominant hodgkin lymphoma. Germ cell tumors include without limitation germinoma, dysgerminoma, seminoma, nongerminomatous germ cell tumor, embryonal carcinoma, endodermal sinus turmor, choriocarcinoma, teratoma, polyembryoma, and gonadoblastoma. Blastoma includes without limitation nephroblastoma, medulloblastoma, and retinoblastoma. Other cancers include without limitation labial carcinoma, larynx carcinoma, hypopharynx carcinoma, tongue carcinoma, salivary gland carcinoma, gastric carcinoma, adenocarcinoma, thyroid cancer (medullary and papillary thyroid carcinoma), renal carcinoma, kidney parenchyma carcinoma, cervix carcinoma, uterine corpus carcinoma, endometrium carcinoma, chorion carcinoma, testis carcinoma, urinary carcinoma, melanoma, brain tumors such as glioblastoma, astrocytoma, meningioma, medulloblastoma and peripheral neuroectodermal tumors, gall bladder carcinoma, bronchial carcinoma, multiple myeloma, basalioma, teratoma, retinoblastoma, choroidea melanoma, seminoma, rhabdomyosarcoma, craniopharyngeoma, osteosarcoma, chondrosarcoma, myosarcoma, liposarcoma, fibrosarcoma, Ewing sarcoma, and plasmocytoma.

[0168] In a further embodiment, the cancer under analysis may be a lung cancer including non-small cell lung cancer and small cell lung cancer (including small cell carcinoma (oat cell cancer), mixed small cell/large cell carcinoma, and combined small cell carcinoma), colon cancer, breast cancer, prostate cancer, liver cancer, pancreas cancer, brain cancer, kidney cancer, ovarian cancer, stomach cancer, skin cancer, bone cancer, gastric cancer, breast cancer, pancreatic cancer, glioma, glioblastoma, hepatocellular carcinoma, papillary renal carcinoma, head and neck squamous cell carcinoma, leukemia, lymphoma, myeloma, or a solid tumor.

[0169] In embodiments, the cancer comprises an acute lymphoblastic leukemia; acute myeloid leukemia; adrenocortical carcinoma; AIDS-related cancers; AIDS-related lymphoma; anal cancer; appendix cancer; astrocytomas; atypical teratoid/rhabdoid tumor; basal cell carcinoma; bladder cancer; brain stem glioma; brain tumor (including brain stem glioma, central nervous system atypical teratoid/rhabdoid tumor, central nervous system embryonal tumors, astrocytomas, craniopharyngioma, ependymoblastoma, ependymoma, medulloblastoma, medulloepithelioma, pineal parenchymal tumors of intermediate differentiation, supratentorial primitive neuroectodermal tumors and pineoblastoma); breast cancer; bronchial tumors; Burkitt lymphoma; cancer of unknown primary site; carcinoid tumor; carcinoma of unknown primary site; central nervous system atypical teratoid/rhabdoid tumor; central nervous system embryonal tumors; cervical cancer; childhood cancers; chordoma; chronic lymphocytic leukemia; chronic myelogenous leukemia; chronic myeloproliferative disorders; colon cancer; colorectal cancer; craniopharyngioma; cutaneous T-cell lymphoma; endocrine pancreas islet cell tumors; endometrial cancer; ependymoblastoma; ependymoma; esophageal cancer; esthesioneuroblastoma; Ewing sarcoma; extracranial germ cell tumor; extragonadal germ cell tumor; extrahepatic bile duct cancer; gallbladder cancer; gastric (stomach) cancer; gastrointestinal carcinoid tumor; gastrointestinal stromal cell tumor; gastrointestinal stromal tumor (GIST); gestational trophoblastic tumor; glioma; hairy cell leukemia; head and neck cancer; heart cancer; Hodgkin lymphoma; hypopharyngeal cancer; intraocular melanoma; islet cell tumors; Kaposi sarcoma; kidney cancer; Langerhans cell histiocytosis; laryngeal cancer; lip cancer; liver cancer; malignant fibrous histiocytoma bone cancer; medulloblastoma; medulloepithelioma; melanoma; Merkel cell carcinoma; Merkel cell skin carcinoma; mesothelioma; metastatic squamous neck cancer with occult primary; mouth cancer; multiple endocrine neoplasia syndromes; multiple myeloma; multiple myeloma/plasma cell neoplasm; mycosis fungoides; myelodysplastic syndromes; myeloproliferative neoplasms; nasal cavity cancer; nasopharyngeal cancer; neuroblastoma; Non-Hodgkin lymphoma; nonmelanoma skin cancer; non-small cell lung cancer; oral cancer; oral cavity cancer; oropharyngeal cancer; osteosarcoma; other brain and spinal cord tumors; ovarian cancer; ovarian epithelial cancer; ovarian germ cell tumor; ovarian low malignant potential tumor; pancreatic cancer; papillomatosis; paranasal sinus cancer; parathyroid cancer; pelvic cancer; penile cancer; pharyngeal cancer; pineal parenchymal tumors of intermediate differentiation; pineoblastoma; pituitary tumor; plasma cell neoplasm/multiple myeloma; pleuropulmonary blastoma; primary central nervous system (CNS) lymphoma; primary hepatocellular liver cancer; prostate cancer; rectal cancer; renal cancer; renal cell (kidney) cancer; renal cell cancer; respiratory tract cancer; retinoblastoma; rhabdomyosarcoma; salivary gland cancer; Sezary syndrome; small cell lung cancer; small intestine cancer; soft tissue sarcoma; squamous cell carcinoma; squamous neck cancer; stomach (gastric) cancer; supratentorial primitive neuroectodermal tumors; T-cell lymphoma; testicular cancer; throat cancer; thymic carcinoma; thymoma; thyroid cancer; transitional cell cancer; transitional cell cancer of the renal pelvis and ureter; trophoblastic tumor; ureter cancer; urethral cancer; uterine cancer; uterine sarcoma; vaginal cancer; vulvar cancer; Waldenstrom macroglobulinemia; or Wilm's tumor. The methods of the invention can be used to characterize these and other cancers. Thus, characterizing a phenotype can be providing a diagnosis, prognosis or theranosis of one of the cancers disclosed herein.

[0170] In some embodiments, the cancer comprises an acute myeloid leukemia (AML), breast carcinoma, cholangiocarcinoma, colorectal adenocarcinoma, extrahepatic bile duct adenocarcinoma, female genital tract malignancy, gastric adenocarcinoma, gastroesophageal adenocarcinoma, gastrointestinal stromal tumors (GIST), glioblastoma, head and neck squamous carcinoma, leukemia, liver hepatocellular carcinoma, low grade glioma, lung bronchioloalveolar carcinoma (BAC), lung non-small cell lung cancer (NSCLC), lung small cell cancer (SCLC), lymphoma, male genital tract malignancy, malignant solitary fibrous tumor of the pleura (MSFT), melanoma, multiple myeloma, neuroendocrine tumor, nodal diffuse large B-cell lymphoma, non epithelial ovarian cancer (non-EOC), ovarian surface epithelial carcinoma, pancreatic adenocarcinoma, pituitary carcinomas, oligodendroglioma, prostatic adenocarcinoma, retroperitoneal or peritoneal carcinoma, retroperitoneal or peritoneal sarcoma, small intestinal malignancy, soft tissue tumor, thymic carcinoma, thyroid carcinoma, or uveal melanoma. The methods of the invention can be used to characterize these and other cancers. Thus, characterizing a phenotype can be providing a diagnosis, prognosis or theranosis of one of the cancers disclosed herein.

[0171] The phenotype can also be an inflammatory disease, immune disease, or autoimmune disease. For example, the disease may be inflammatory bowel disease (IBD), Crohn's disease (CD), ulcerative colitis (UC), pelvic inflammation, vasculitis, psoriasis, diabetes, autoimmune hepatitis, Multiple Sclerosis, Myasthenia Gravis, Type I diabetes, Rheumatoid Arthritis, Psoriasis, Systemic Lupus Erythematosis (SLE), Hashimoto's Thyroiditis, Grave's disease, Ankylosing Spondylitis Sjogrens Disease, CREST syndrome, Scleroderma, Rheumatic Disease, organ rejection, Primary Sclerosing Cholangitis, or sepsis.

[0172] The phenotype can also comprise a cardiovascular disease, such as atherosclerosis, congestive heart failure, vulnerable plaque, stroke, or ischemia. The cardiovascular disease or condition can be high blood pressure, stenosis, vessel occlusion or a thrombotic event.

[0173] The phenotype can also comprise a neurological disease, such as Multiple Sclerosis (MS), Parkinson's Disease (PD), Alzheimer's Disease (AD), schizophrenia, bipolar disorder, depression, autism, Prion Disease, Pick's disease, dementia, Huntington disease (HD), Down's syndrome, cerebrovascular disease, Rasmussen's encephalitis, viral meningitis, neurospsychiatric systemic lupus erythematosus (NPSLE), amyotrophic lateral sclerosis, Creutzfeldt-Jacob disease, Gerstmann-Straussler-Scheinker disease, transmissible spongiform encephalopathy, ischemic reperfusion damage (e.g. stroke), brain trauma, microbial infection, or chronic fatigue syndrome. The phenotype may also be a condition such as fibromyalgia, chronic neuropathic pain, or peripheral neuropathic pain.

[0174] The phenotype may also comprise an infectious disease, such as a bacterial, viral or yeast infection. For example, the disease or condition may be Whipple's Disease, Prion Disease, cirrhosis, methicillin-resistant staphylococcus aureus, HIV, hepatitis, syphilis, meningitis, malaria, tuberculosis, or influenza. Viral proteins, such as HIV or HCV-like particles can be assessed in a vesicle, to characterize a viral condition.

[0175] The phenotype can also comprise a perinatal or pregnancy related condition (e.g. preeclampsia or preterm birth), metabolic disease or condition, such as a metabolic disease or condition associated with iron metabolism. For example, hepcidin can be assayed in a vesicle to characterize an iron deficiency. The metabolic disease or condition can also be diabetes, inflammation, or a perinatal condition.

[0176] The compositions and methods of the invention can be used to characterize these and other diseases and disorders that can be assessed via biomarkers. Thus, characterizing a phenotype can be providing a diagnosis, prognosis or theranosis of one of the diseases and disorders disclosed herein.

### Subject

[0177] One or more phenotypes of a subject can be determined by analyzing one or more vesicles, such as vesicles, in a biological sample obtained from the subject. A subject or patient can include, but is not limited to, mammals such as bovine, avian, canine, equine, feline, ovine, porcine, or primate animals (including humans and non-human primates). A subject can also include a mammal of importance due to being endangered, such as a Siberian tiger; or economic importance, such as an animal raised on a farm for consumption by humans, or an animal of social importance to humans, such as an animal kept as a pet or in a zoo. Examples of such animals include, but are not limited to, carnivores such as cats and dogs; swine including pigs, hogs and wild boars; ruminants or ungulates such as cattle, oxen, sheep, giraffes, deer, goats, bison, camels or horses. Also included are birds that are endangered or kept in zoos, as well as fowl and more particularly domesticated fowl, i.e. poultry, such as turkeys and chickens, ducks, geese, guinea fowl. Also included are domesticated swine and horses (including race horses). In addition, any animal species connected to commercial activities are also included such as those animals connected to agriculture and aquaculture and other activities in which disease monitoring, diagnosis, and therapy selection are routine practice in husbandry for economic productivity and/or safety of the food chain.

[0178] The subject can have a pre-existing disease or condition, such as cancer. Alternatively, the subject may not have any known pre-existing condition. The subject may also be non-responsive to an existing or past treatment, such as a treatment for cancer.

### Samples

[0179] A sample used and/or assessed via the compositions and methods of the invention includes any relevant biological sample that can be used for biomarker assessment, including without limitation sections of tissues such as biopsy or tissue removed during surgical or other procedures, bodily fluids, autopsy samples, frozen sections taken for histological purposes, and cell cultures. Such samples include blood and blood fractions or products (e.g., serum, buffy coat, plasma, platelets, red blood cells, and the like), sputum, malignant effusion, cheek cells tissue, cultured cells (e.g., primary cultures, explants, and transformed cells), stool, urine, other biological or bodily fluids (e.g., prostatic fluid, gastric fluid, intestinal fluid, renal fluid, lung fluid, cerebrospinal fluid, and the like), etc. The sample can comprise biological material that is a fresh frozen & formalin fixed paraffin embedded (FFPE) block, formalin-fixed paraffin embedded, or is within an RNA preservative+formalin fixative. More than one sample of more than one type can be used for each patient.

[0180] The sample used in the methods described herein can be a formalin fixed paraffin embedded (FFPE) sample. The FFPE sample can be one or more of fixed tissue, unstained slides, bone marrow core or clot, core needle biopsy, malignant fluids and fine needle aspirate (FNA). In an embodiment, the fixed tissue comprises a tumor containing formalin fixed paraffin embedded (FFPE) block from a surgery or biopsy. In another embodiment, the unstained slides comprise unstained, charged, unbaked slides from a paraffin block. In another embodiment, bone marrow core or clot comprises a decalcified core. A formalin fixed core and/or clot can be paraffin-embedded. In still another embodiment, the core needle biopsy comprises 1, 2, 3, 4, 5, 6, 7, 8, 9, 10 or more, e.g., 3-4, paraffin embedded biopsy samples. An 18 gauge needle biopsy can be used. The malignant fluid can comprise a sufficient volume of fresh pleural/ascitic fluid to produce a 5×5×2 mm cell pellet. The fluid can be formalin fixed in a paraffin block. In an embodiment, the core needle biopsy comprises 1, 2, 3, 4, 5, 6, 7, 8, 9, 10 or more, e.g., 4-6, paraffin embedded aspirates.

[0181] A sample may be processed according to techniques understood by those in the art. A sample can be without limitation fresh, frozen or fixed cells or tissue. In some embodiments, a sample comprises formalin-fixed paraffin-embedded (FFPE) tissue, fresh tissue or fresh frozen (FF) tissue. A sample can comprise cultured cells, including primary or immortalized cell lines derived from a subject sample. A sample can also refer to an extract from a sample from a subject. For example, a sample can comprise DNA, RNA or protein extracted from a tissue or a bodily fluid. Many techniques and commercial kits are available for such purposes. The fresh sample from the individual can be treated with an agent to preserve RNA prior to further processing, e.g., cell lysis and extraction. Samples can include frozen samples collected for other purposes. Samples can be associated with relevant information such as age, gender, and clinical symptoms present in the subject; source of the sample; and methods of collection and storage of the sample. A sample is typically obtained from a subject.

[0182] A biopsy comprises the process of removing a tissue sample for diagnostic or prognostic evaluation, and to the tissue specimen itself. Any biopsy technique known in the art can be applied to the molecular profiling methods of the present invention. The biopsy technique applied can depend on the tissue type to be evaluated (e.g., colon, prostate, kidney, bladder, lymph node, liver, bone marrow, blood cell, lung, breast, etc.), the size and type of the tumor (e.g., solid or suspended, blood or ascites), among other factors. Representative biopsy techniques include, but are not limited to, excisional biopsy, incisional biopsy, needle biopsy, surgical biopsy, and bone marrow biopsy. An “excisional biopsy” refers to the removal of an entire tumor mass with a small margin of normal tissue surrounding it. An “incisional biopsy” refers to the removal of a wedge of tissue that includes a cross-sectional diameter of the tumor. Molecular profiling can use a “core-needle biopsy” of the tumor mass, or a “fine-needle aspiration biopsy” which generally obtains a suspension of cells from within the tumor mass. Biopsy techniques are discussed, for example, in Harrison's Principles of Internal Medicine, Kasper, et al., eds., 16th ed., 2005, Chapter 70, and throughout Part V.

[0183] Standard molecular biology techniques known in the art and not specifically described are generally followed as in Sambrook et al., Molecular Cloning: A Laboratory Manual, Cold Spring Harbor Laboratory Press, New York (1989), and as in Ausubel et al., Current Protocols in Molecular Biology, John Wiley and Sons, Baltimore, Md. (1989) and as in Perbal, A Practical Guide to Molecular Cloning, John Wiley & Sons, New York (1988), and as in Watson et al., Recombinant DNA, Scientific American Books, New York and in Birren et al (eds) Genome Analysis: A Laboratory Manual Series, Vols. 1-4 Cold Spring Harbor Laboratory Press, New York (1998) and methodology as set forth in U.S. Pat. Nos. 4,666,828; 4,683,202; 4,801,531; 5,192,659 and 5,272,057 and incorporated herein by reference. Polymerase chain reaction (PCR) can be carried out generally as in PCR Protocols: A Guide to Methods and Applications, Academic Press, San Diego, Calif. (1990).

[0184] The biological sample assessed using the compositions and methods of the invention can be any useful bodily or biological fluid, including but not limited to peripheral blood, sera, plasma, ascites, urine, cerebrospinal fluid (CSF), sputum, saliva, bone marrow, synovial fluid, aqueous humor, amniotic fluid, cerumen, breast milk, broncheoalveolar lavage fluid, semen (including prostatic fluid), Cowper's fluid or pre-ejaculatory fluid, female ejaculate, sweat, fecal matter, hair, tears, cyst fluid, pleural and peritoneal fluid, pericardial fluid, lymph, chyme, chyle, bile, interstitial fluid, menses, pus, sebum, vomit, vaginal secretions, mucosal secretion, stool water, pancreatic juice, lavage fluids from sinus cavities, bronchopulmonary aspirates or other lavage fluids, cells, cell culture, or a cell culture supernatant. A biological sample may also include the blastocyl cavity, umbilical cord blood, or maternal circulation which may be of fetal or maternal origin. The biological sample may also be a cell culture, tissue sample or biopsy from which vesicles and other circulating biomarkers may be obtained. For example, cells of interest can be cultured and vesicles isolated from the culture. In various embodiments, biomarkers or more particularly biosignatures disclosed herein can be assessed directly from such biological samples (e.g., identification of presence or levels of nucleic acid or polypeptide biomarkers or functional fragments thereof) using various methods, such as extraction of nucleic acid molecules from blood, plasma, serum or any of the foregoing biological samples, use of protein or antibody arrays to identify polypeptide (or functional fragment) biomarker(s), as well as other array, sequencing, PCR and proteomic techniques known in the art for identification and assessment of nucleic acid and polypeptide molecules. In addition, one or more components present in such samples can be first isolated or enriched and further processed to assess the presence or levels of selected biomarkers, to assess a given biosignature (e.g., isolated microvesicles prior to profiling for protein and/or nucleic acid biomarkers).

[0185] Table 1 presents a non-limiting listing of diseases, conditions, or biological states and corresponding biological samples that may be used for analysis according to the methods of the invention.

TABLE 1
Examples of Biological Samples for Various Diseases,
Conditions, or Biological States

| Illustrative Disease, Condition or Biological | |
|---|---|
| State | Illustrative Biological Samples |
| Cancers/neoplasms affecting the following tissue | Tumor, blood, serum, plasma, cerebrospinal fluid |
| types/bodily systems: breast, lung, ovarian, colon, | (CSF), urine, sputum, ascites, synovial fluid, |
| rectal, prostate, pancreatic, brain, bone, connective | semen, nipple aspirates, saliva, bronchoalveolar |
| tissue, glands, skin, lymph, nervous system, | lavage fluid, tears, oropharyngeal washes, feces, |
| endocrine, germ cell, genitourinary, | peritoneal fluids, pleural effusion, sweat, tears, |
| hematologic/blood, bone marrow, muscle, eye, | aqueous humor, pericardial fluid, lymph, chyme, |
| esophageal, fat tissue, thyroid, pituitary, spinal | chyle, bile, stool water, amniotic fluid, breast milk, |
| cord, bile duct, heart, gall bladder, bladder, testes, | pancreatic juice, cerumen, Cowper's fluid or pre- |
| cervical, endometrial, renal, ovarian, | ejaculatory fluid, female ejaculate, interstitial fluid, |
| digestive/gastrointestinal, stomach, head and neck, | menses, mucus, pus, sebum, vaginal lubrication, |
| liver, leukemia, respiratory/thorasic, cancers of | vomit |
| unknown primary (CUP) | |
| Neurodegenerative/neurological disorders: | Blood, serum, plasma, CSF, urine |
| Parkinson's disease, Alzheimer's Disease and | |
| multiple sclerosis, Schizophrenia, and bipolar | |
| disorder, spasticity disorders, epilepsy | |
| Cardiovascular Disease: atherosclerosis, | Blood, serum, plasma, CSF, urine |
| cardiomyopathy, endocarditis, vunerable plaques, | |
| infection | |
| Stroke: ischemic, intracerebral hemorrhage, | Blood, serum, plasma, CSF, urine |
| subarachnoid hemorrhage, transient ischemic | |
| attacks (TIA) | |
| Pain disorders: peripheral neuropathic pain and | Blood, serum, plasma, CSF, urine |
| chronic neuropathic pain, and fibromyalgia, | |
| Autoimmune disease: systemic and localized | Blood, serum, plasma, CSF, urine, synovial fluid |
| diseases, rheumatic disease, Lupus, Sjogren's | |
| syndrome | |
| Digestive system abnormalities: Barrett's | Blood, serum, plasma, CSF, urine |
| esophagus, irritable bowel syndrome, ulcerative | |
| colitis, Crohn's disease, Diverticulosis and | |
| Diverticulitis, Celiac Disease | |
| Endocrine disorders: diabetes mellitus, various | Blood, serum, plasma, CSF, urine |
| forms of Thyroiditis, adrenal disorders, pituitary | |
| disorders | |
| Diseases and disorders of the skin: psoriasis | Blood, serum, plasma, CSF, urine, synovial fluid, |
| | tears |
| Urological disorders: benign prostatic hypertrophy | Blood, serum, plasma, urine |
| (BPH), polycystic kidney disease, interstitial | |
| cystitis | |
| Hepatic disease/injury: Cirrhosis, induced | Blood, serum, plasma, urine |
| hepatotoxicity (due to exposure to natural or | |
| synthetic chemical sources) | |
| Kidney disease/injury: acute, sub-acute, chronic | Blood, serum, plasma, urine |
| conditions, Podocyte injury, focal segmental | |
| glomerulosclerosis | |
| Endometriosis | Blood, serum, plasma, urine, vaginal fluids |
| Osteoporosis | Blood, serum, plasma, urine, synovial fluid |
| Pancreatitis | Blood, serum, plasma, urine, pancreatic juice |
| Asthma | Blood, serum, plasma, urine, sputum, bronchiolar |
| | lavage fluid |
| Allergies | Blood, serum, plasma, urine, sputum, bronchiolar |
| | lavage fluid |
| Prion-related diseases | Blood, serum, plasma, CSF, urine |
| Viral Infections: HIV/AIDS | Blood, serum, plasma, urine |
| Sepsis | Blood, serum, plasma, urine, tears, nasal lavage |
| Organ rejection/transplantation | Blood, serum, plasma, urine, various lavage fluids |
| Differentiating conditions: adenoma versus | Blood, serum, plasma, urine, sputum, feces, colonic |
| hyperplastic polyp, irritable bowel syndrome (IBS) | lavage fluid |
| versus normal, classifying Dukes stages A, B, C, | |
| and/or D of colon cancer, adenoma with low-grade | |
| hyperplasia versus high-grade hyperplasia, | |
| adenoma versus normal, colorectal cancer versus | |
| normal, IBS versus. ulcerative colitis (UC) versus | |
| Crohn's disease (CD), | |
| Pregnancy related physiological states, conditions, | Maternal serum, plasma, amniotic fluid, cord blood |
| or affiliated diseases: genetic risk, adverse | |
| pregnancy outcomes | |

[0186] The methods of the invention can be used to characterize a phenotype using a blood sample or blood derivative. Blood derivatives include plasma and serum. Blood plasma is the liquid component of whole blood, and makes up approximately 55% of the total blood volume. It is composed primarily of water with small amounts of minerals, salts, ions, nutrients, and proteins in solution. In whole blood, red blood cells, leukocytes, and platelets are suspended within the plasma. Blood serum refers to blood plasma without fibrinogen or other clotting factors (i.e., whole blood minus both the cells and the clotting factors).

[0187] The biological sample may be obtained through a third party, such as a party not performing the analysis of the biomarkers, whether direct assessment of a biological sample or by profiling one or more vesicles obtained from the biological sample. For example, the sample may be obtained through a clinician, physician, or other health care manager of a subject from which the sample is derived. Alternatively, the biological sample may obtained by the same party analyzing the vesicle. In addition, biological samples be assayed, are archived (e.g., frozen) or otherwise stored in under preservative conditions.

[0188] Furthermore, a biological sample can comprise a vesicle or cell membrane fragment that is derived from a cell of origin and available extracellularly in a subject's biological fluid or extracellular milieu.

[0189] Methods of the invention can include assessing one or more vesicles, including assessing vesicle populations. A vesicle, as used herein, is a membrane vesicle that is shed from cells. Vesicles or membrane vesicles include without limitation: circulating microvesicles (cMVs), microvesicle, exosome, nanovesicle, dexosome, bleb, blebby, prostasome, microparticle, intralumenal vesicle, membrane fragment, intralumenal endosomal vesicle, endosomal-like vesicle, exocytosis vehicle, endosome vesicle, endosomal vesicle, apoptotic body, multivesicular body, secretory vesicle, phospholipid vesicle, liposomal vesicle, argosome, texasome, secresome, tolerosome, melanosome, oncosome, or exocytosed vehicle. Furthermore, although vesicles may be produced by different cellular processes, the methods of the invention are not limited to or reliant on any one mechanism, insofar as such vesicles are present in a biological sample and are capable of being characterized by the methods disclosed herein. Unless otherwise specified, methods that make use of a species of vesicle can be applied to other types of vesicles. Vesicles comprise spherical structures with a lipid bilayer similar to cell membranes which surrounds an inner compartment which can contain soluble components, sometimes referred to as the payload. In some embodiments, the methods of the invention make use of exosomes, which are small secreted vesicles of about 40-100 nm in diameter. For a review of membrane vesicles, including types and characterizations, see Thery et al., Nat Rev Immunol. 2009 August; 9(8):581-93. Some properties of different types of vesicles include those in Table 2:

TABLE 2
Vesicle Properties

| | | | | Membrane | Exosome- | Apoptotic |
|---|---|---|---|---|---|---|
| Feature | Exosomes | Microvesicles | Ectosomes | particles | like vesicles | vesicles |
| Size | 50-100 nm | 100-1,000 nm | 50-200 nm | 50-80 nm | 20-50 nm | 50-500 nm |
| Density in | 1.13-1.19 g/ml | | | 1.04-1.07 g/ml | 1.1 g/ml | 1.16-1.28 g/ml |
| sucrose | | | | | | |
| EM | Cup shape | Irregular | Bilamellar | Round | Irregular | Heterogeneous |
| appearance | | shape, | round | | shape | |
| | | electron | structures | | | |
| | | dense | | | | |
| Sedimentation | 100,000 g | 10,000 g | 160,000- | 100,000- | 175,000 g | 1,200 g, |
| | | | 200,000 g | 200,000 g | | 10,000 g, |
| | | | | | | 100,000 g |
| Lipid | Enriched in | Expose PPS | Enriched in | | No lipid | |
| composition | cholesterol, | | cholesterol | | rafts | |
| | sphingomyelin | | and | | | |
| | and ceramide; | | diacylglycerol; | | | |
| | contains lipid | | expose PPS | | | |
| | rafts; expose | | | | | |
| | PPS | | | | | |
| Major protein | Tetraspanins | Integrins, | CR1 and | CD133; no | TNFRI | Histones |
| markers | (e.g., CD63, | selectins | and proteolytic | CD63 | | |
| | CD9), Alix, | CD40 ligand | enzymes; no | | | |
| | TSG101 | | CD63 | | | |
| Intracellular | Internal | Plasma | Plasma | Plasma | | |
| origin | compartments | membrane | membrane | membrane | | |
| | (endosomes) | | | | | |

Abbreviations:
phosphatidylserine (PPS);
electron microscopy (EM)

[0190] Vesicles include shed membrane bound particles, or “microparticles,” that are derived from either the plasma membrane or an internal membrane. Vesicles can be released into the extracellular environment from cells. Cells releasing vesicles include without limitation cells that originate from, or are derived from, the ectoderm, endoderm, or mesoderm. The cells may have undergone genetic, environmental, and/or any other variations or alterations. For example, the cell can be tumor cells. A vesicle can reflect any changes in the source cell, and thereby reflect changes in the originating cells, e.g., cells having various genetic mutations. In one mechanism, a vesicle is generated intracellularly when a segment of the cell membrane spontaneously invaginates and is ultimately exocytosed (see for example, Keller et al., Immunol. Lett. 107 (2): 102-8 (2006)). Vesicles also include cell-derived structures bounded by a lipid bilayer membrane arising from both herniated evagination (blebbing) separation and sealing of portions of the plasma membrane or from the export of any intracellular membrane-bounded vesicular structure containing various membrane-associated proteins of tumor origin, including surface-bound molecules derived from the host circulation that bind selectively to the tumor-derived proteins together with molecules contained in the vesicle lumen, including but not limited to tumor-derived microRNAs or intracellular proteins. Blebs and blebbing are further described in Charras et al., Nature Reviews Molecular and Cell Biology, Vol. 9, No. 11, p. 730-736 (2008). A vesicle shed into circulation or bodily fluids from tumor cells may be referred to as a “circulating tumor-derived vesicle.” When such vesicle is an exosome, it may be referred to as a circulating-tumor derived exosome (CTE). In some instances, a vesicle can be derived from a specific cell of origin. CTE, as with a cell-of-origin specific vesicle, typically have one or more unique biomarkers that permit isolation of the CTE or cell-of-origin specific vesicle, e.g., from a bodily fluid and sometimes in a specific manner. For example, a cell or tissue specific markers are used to identify the cell of origin. Examples of such cell or tissue specific markers are disclosed herein and can further be accessed in the Tissue-specific Gene Expression and Regulation (TiGER) Database, available at bioinfo.wilmer.jhu.edu/tiger/; Liu et al. (2008) TiGER: a database for tissue-specific gene expression and regulation. BMC Bioinformatics. 9:271; TissueDistributionDBs, available at genome.dkfz-heidelberg.de/menu/tissue_db/index.html.

[0191] A vesicle can have a diameter of greater than about 10 nm, 20 nm, or 30 nm. A vesicle can have a diameter of greater than 40 nm, 50 nm, 100 nm, 200 nm, 500 nm, 1000 nm, 1500 nm, 2000 nm or greater than 10,000 nm. A vesicle can have a diameter of about 20-2000 nm, about 20-1500 nm, about 30-1000 nm, about 30-800 nm, about 30-200 nm, or about 30-100 nm. In some embodiments, the vesicle has a diameter of less than 10,000 nm, 2000 nm, 1500 nm, 1000 nm, 800 nm, 500 nm, 200 nm, 100 nm, 50 nm, 40 nm, 30 nm, 20 nm or less than 10 nm. As used herein the term “about” in reference to a numerical value means that variations of 10% above or below the numerical value are within the range ascribed to the specified value. Typical sizes for various types of vesicles are shown in Table 2. Vesicles can be assessed to measure the diameter of a single vesicle or any number of vesicles. For example, the range of diameters of a vesicle population or an average diameter of a vesicle population can be determined. Vesicle diameter can be assessed using methods known in the art, e.g., imaging technologies such as electron microscopy. In an embodiment, a diameter of one or more vesicles is determined using optical particle detection. See, e.g., U.S. Pat. No. 7,751,053, entitled “Optical Detection and Analysis of Particles” and issued Jul. 6, 2010; and U.S. Pat. No. 7,399,600, entitled “Optical Detection and Analysis of Particles” and issued Jul. 15, 2010.

[0192] In some embodiments, the methods of the invention comprise assessing vesicles directly such as in a biological sample without prior isolation, purification, or concentration from the biological sample. For example, the amount of vesicles in the sample can by itself provide a biosignature that provides a diagnostic, prognostic or theranostic determination. Alternatively, the vesicle in the sample may be isolated, captured, purified, or concentrated from a sample prior to analysis. As noted, isolation, capture or purification as used herein comprises partial isolation, partial capture or partial purification apart from other components in the sample. Vesicle isolation can be performed using various techniques as described herein, e.g., chromatography, filtration, centrifugation, flow cytometry, affinity capture (e.g., to a planar surface or bead), and/or using microfluidics. FIGS. 19B-C present an overview of a method of the invention for assessing microvesicles using an aptamer pool.

[0193] Vesicles such as exosomes can be assessed to provide a phenotypic characterization by comparing vesicle characteristics to a reference. In some embodiments, surface antigens on a vesicle are assessed. The surface antigens can provide an indication of the anatomical origin and/or cellular of the vesicles and other phenotypic information, e.g., tumor status. For example, wherein vesicles found in a patient sample, e.g., a bodily fluid such as blood, serum or plasma, are assessed for surface antigens indicative of colorectal origin and the presence of cancer. The surface antigens may comprise any informative biological entity that can be detected on the vesicle membrane surface, including without limitation surface proteins, lipids, carbohydrates, and other membrane components. For example, positive detection of colon derived vesicles expressing tumor antigens can indicate that the patient has colorectal cancer. As such, methods of the invention can be used to characterize any disease or condition associated with an anatomical or cellular origin, by assessing, for example, disease-specific and cell-specific biomarkers of one or more vesicles obtained from a subject.

[0194] In another embodiment, the methods of the invention comprise assessing one or more vesicle payload to provide a phenotypic characterization. The payload with a vesicle comprises any informative biological entity that can be detected as encapsulated within the vesicle, including without limitation proteins and nucleic acids, e.g., genomic or cDNA, mRNA, or functional fragments thereof, as well as microRNAs (miRs). In addition, methods of the invention are directed to detecting vesicle surface antigens (in addition or exclusive to vesicle payload) to provide a phenotypic characterization. For example, vesicles can be characterized by using binding agents (e.g., antibodies or aptamers) that are specific to vesicle surface antigens, and the bound vesicles can be further assessed to identify one or more payload components disclosed therein. As described herein, the levels of vesicles with surface antigens of interest or with payload of interest can be compared to a reference to characterize a phenotype. For example, overexpression in a sample of cancer-related surface antigens or vesicle payload, e.g., a tumor associated mRNA or microRNA, as compared to a reference, can indicate the presence of cancer in the sample. The biomarkers assessed can be present or absent, increased or reduced based on the selection of the desired target sample and comparison of the target sample to the desired reference sample. Non-limiting examples of target samples include: disease; treated/not-treated; different time points, such as a in a longitudinal study; and non-limiting examples of reference sample: non-disease; normal; different time points; and sensitive or resistant to candidate treatment(s).

### Microvesicle Isolation and Analysis

[0195] Sample Processing

[0196] A vesicle or a population of vesicles may be isolated, purified, concentrated or otherwise enriched prior to and/or during analysis. Unless otherwise specified, the terms “purified,” “isolated,” or similar as used herein in reference to vesicles or biomarker components are intended to include partial or complete purification or isolation of such components from a cell or organism. Analysis of a vesicle can include quantitating the amount one or more vesicle populations of a biological sample. For example, a heterogeneous population of vesicles can be quantitated, or a homogeneous population of vesicles, such as a population of vesicles with a particular biomarker profile, a particular biosignature, or derived from a particular cell type can be isolated from a heterogeneous population of vesicles and quantitated. Analysis of a vesicle can also include detecting, quantitatively or qualitatively, one or more particular biomarker profile or biosignature of a vesicle, as described herein.

[0197] A vesicle can be stored and archived, such as in a bio-fluid bank and retrieved for analysis as desired. A vesicle may also be isolated from a biological sample that has been previously harvested and stored from a living or deceased subject. In addition, a vesicle may be isolated from a biological sample which has been collected as described in King et al., Breast Cancer Res 7(5): 198-204 (2005). A vesicle can be isolated from an archived or stored sample. Alternatively, a vesicle may be isolated from a biological sample and analyzed without storing or archiving of the sample. Furthermore, a third party may obtain or store the biological sample, or obtain or store the vesicle for analysis.

[0198] An enriched population of vesicles can be obtained from a biological sample. For example, vesicles may be concentrated or isolated from a biological sample using size exclusion chromatography, density gradient centrifugation, differential centrifugation, nanomembrane ultrafiltration, immunoabsorbent capture, affinity purification, microfluidic separation, or combinations thereof.

[0199] Size exclusion chromatography, such as gel permeation columns, centrifugation or density gradient centrifugation, and filtration methods can be used. For example, a vesicle can be isolated by differential centrifugation, anion exchange and/or gel permeation chromatography (for example, as described in U.S. Pat. Nos. 6,899,863 and 6,812,023), sucrose density gradients, organelle electrophoresis (for example, as described in U.S. Pat. No. 7,198,923), magnetic activated cell sorting (MACS), or with a nanomembrane ultrafiltration concentrator. Various combinations of isolation or concentration methods can be used.

[0200] Highly abundant proteins, such as albumin and immunoglobulin in blood samples, may hinder isolation of vesicles from a biological sample. For example, a vesicle can be isolated from a biological sample using a system that uses multiple antibodies that are specific to the most abundant proteins found in a biological sample, such as blood. Such a system can remove up to several proteins at once, thus unveiling the lower abundance species such as cell-of-origin specific vesicles. This type of system can be used for isolation of vesicles from biological samples such as blood, cerebrospinal fluid or urine. The isolation of vesicles from a biological sample may also be enhanced by high abundant protein removal methods as described in Chromy et al. J Proteome Res 2004; 3:1120-1127. In another embodiment, the isolation of vesicles from a biological sample may also be enhanced by removing serum proteins using glycopeptide capture as described in Zhang et al, Mol Cell Proteomics 2005; 4:144-155. In addition, vesicles from a biological sample such as urine may be isolated by differential centrifugation followed by contact with antibodies directed to cytoplasmic or anti-cytoplasmic epitopes as described in Pisitkun et al., Proc Natl Acad Sci USA, 2004; 101:13368-13373.

[0201] Plasma contains a large variety of proteins including albumin, immunoglobulins, and clotting proteins such as fibrinogen. About 60% of plasma protein comprises the protein albumin (e.g., human serum albumin or HSA), which contributes to osmotic pressure of plasma to assist in the transport of lipids and steroid hormones. Globulins make up about 35% of plasma proteins and are used in the transport of ions, hormones and lipids assisting in immune function. About 4% of plasma protein comprises fibrinogen which is essential in the clotting of blood and can be converted into the insoluble protein fibrin. Other types of blood proteins include: Prealbumin, Alpha 1 antitrypsin, Alpha 1 acid glycoprotein, Alpha 1 fetoprotein, Haptoglobin, Alpha 2 macroglobulin, Ceruloplasmin, Transferrin, complement proteins C3 and C4, Beta 2 microglobulin, Beta lipoprotein, Gamma globulin proteins, C-reactive protein (CRP), Lipoproteins (chylomicrons, VLDL, LDL, HDL), other globulins (types alpha, beta and gamma), Prothrombin and Mannose-binding lectin (MBL). Any of these proteins, including classes of proteins, or derivatives thereof (such as fibrin which is derived from the cleavage of fibrinogen) can be selectively depleted from a biological sample prior to further analysis performed on the sample. Without being bound by theory, removal of such background proteins may facilitate more sensitive, accurate, or precise detection of the biomarkers of interest in the sample.

[0202] Abundant proteins in blood or blood derivatives (e.g., plasma or serum) include without limitation albumin, IgG, transferrin, fibrinogen, IgA, α₂-Macroglobulin, IgM, α₁-Antitrypsin, complement C3, haptoglobulin, apolipoprotein A1, apolipoprotein A3, apolipoprotein B, α₁-Acid Glycoprotein, ceruloplasmin, complement C4, C1q, IgD, prealbumin (transthyretin), and plasminogen. Such proteins can be depleted using commercially available columns and kits. Examples of such columns comprise the Multiple Affinity Removal System from Agilent Technologies (Santa Clara, Calif.). This system include various cartridges designed to deplete different protein profiles, including the following cartridges with performance characteristics according to the manufacturer: Human 14, which eliminates approximately 94% of total protein (albumin, IgG, antitrypsin, IgA, transferrin, haptoglobin, fibrinogen, alpha2-macroglobulin, alpha1-acid glycoprotein (orosomucoid), IgM, apolipoprotein AI, apolipoprotein AII, complement C3 and transthyretin); Human 7, which eliminates approximately 85-90% of total protein (albumin, IgG, IgA, transferrin, haptoglobin, antitrypsin, and fibrinogen); Human 6, which eliminates approximately 85-90% of total protein (albumin, IgG, IgA, transferrin, haptoglobin, and antitrypsin); Human Albumin/IgG, which eliminates approximately 69% of total protein (albumin and IgG); and Human Albumin, which eliminates approximately 50-55% of total protein (albumin). The ProteoPrep® 20 Plasma Immunodepletion Kit from Sigma-Aldrich is intended to specifically remove the 20 most abundant proteins from human plasma or serum, which is about remove 97-98% of the total protein mass in plasma or serum (Sigma-Aldrich, St. Louis, Mo.). According to the manufacturer, the ProteoPrep® 20 removes: albumin, IgG, transferrin, fibrinogen, IgA, α₂-Macroglobulin, IgM, α₁-Antitrypsin, complement C3, haptoglobulin, apolipoprotein A1, A3 and B; α₁-Acid Glycoprotein, ceruloplasmin, complement C4, C1q; IgD, prealbumin, and plasminogen. Sigma-Aldrich also manufactures ProteoPrep® columns to remove albumin (HSA) and immunoglobulins (IgG). The ProteomeLab IgY-12 High Capacity Proteome Partitioning kits from Beckman Coulter (Fullerton, Calif.) are specifically designed to remove twelve highly abundant proteins (Albumin, IgG, Transferrin, Fibrinogen, IgA, α2-macroglobulin, IgM, al-Antitrypsin, Haptoglobin, Orosomucoid, Apolipoprotein A-I, Apolipoprotein A-II) from the human biological fluids such as serum and plasma. Generally, such systems rely on immunodepletion to remove the target proteins, e.g., using small ligands and/or full antibodies. The PureProteome™ Human Albumin/Immunoglobulin Depletion Kit from Millipore (EMD Millipore Corporation, Billerica, Mass., USA) is a magnetic bead based kit that enables high depletion efficiency (typically >99%) of Albumin and all Immunoglobulins (i.e., IgG, IgA, IgM, IgE and IgD) from human serum or plasma samples. The ProteoExtract® Albumin/IgG Removal Kit, also from Millipore, is designed to deplete >80% of albumin and IgG from body fluid samples. Other similar protein depletion products include without limitation the following: Aurum™ Affi-Gels Blue mini kit (Bio-Rad, Hercules, Calif., USA); Vivapure® anti-HSA/IgG kit (Sartorius Stedim Biotech, Goettingen, Germany), Qproteome albumin/IgG depletion kit (Qiagen, Hilden, Germany); Seppro® MIXED 12-LC20 column (GenWay Biotech, San Diego, Calif., USA); Abundant Serum Protein Depletion Kit (Norgen Biotek Corp., Ontario, Canada); GBC Human Albumin/IgG/Transferrin 3 in 1 Depletion Column/Kit (Good Biotech Corp., Taiwan). These systems and similar systems can be used to remove abundant proteins from a biological sample, thereby improving the ability to detect low abundance circulating biomarkers such as proteins and vesicles.

[0203] Thromboplastin is a plasma protein aiding blood coagulation through conversion of prothrombin to thrombin. Thrombin in turn acts as a serine protease that converts soluble fibrinogen into insoluble strands of fibrin, as well as catalyzing many other coagulation-related reactions. Thus, thromboplastin is a protein that can be used to facilitate precipitation of fibrinogen/fibrin (blood clotting factors) out of plasma. In addition to or as an alternative to immunoaffinity protein removal, a blood sample can be treated with thromboplastin to deplete fibrinogen/fibrin. Thromboplastin removal can be performed in addition to or as an alternative to immunoaffinity protein removal as described above using methods known in the art. Precipitation of other proteins and/or other sample particulate can also improve detection of circulating biomarkers such as vesicles in a sample. For example, ammonium sulfate treatment as known in the art can be used to precipitate immunoglobulins and other highly abundant proteins.

[0204] In an embodiment, the invention provides a method of detecting a presence or level of one or more circulating biomarker such as a microvesicle in a biological sample, comprising: (a) providing a biological sample comprising or suspected to comprise the one or more circulating biomarker; (b) selectively depleting one or more abundant protein from the biological sample provided in step (a); (c) performing affinity selection of the one or more circulating biomarker from the sample depleted in step (b), thereby detecting the presence or level of one or more circulating biomarker. The biological sample may comprise a bodily fluid, e.g., peripheral blood, sera, plasma, ascites, urine, cerebrospinal fluid (CSF), sputum, saliva, bone marrow, synovial fluid, aqueous humor, amniotic fluid, cerumen, breast milk, broncheoalveolar lavage fluid, semen, prostatic fluid, cowper's fluid or pre-ejaculatory fluid, female ejaculate, sweat, fecal matter, hair, tears, cyst fluid, pleural and peritoneal fluid, pericardial fluid, lymph, chyme, chyle, bile, interstitial fluid, menses, pus, sebum, vomit, vaginal secretions, mucosal secretion, stool water, pancreatic juice, lavage fluids from sinus cavities, bronchopulmonary aspirates, blastocyl cavity fluid, umbilical cord blood, or a derivative of any thereof. In some embodiments, the biological sample comprises peripheral blood, serum or plasma. Illustrative protocols and results from selectively depleting one or more abundant protein from blood plasma prior to vesicle detection can be found in Example 40 of International Patent Publication No. WO/2014/082083, filed Nov. 26, 2013, which patent publication is incorporated by reference herein in its entirety.

[0205] An abundant protein may comprise a protein in the sample that is present in the sample at a high enough concentration to potentially interfere with downstream processing or analysis. Typically, an abundant protein is not the target of any further analysis of the sample. The abundant protein may constitute at least 10⁻⁵, 10⁻⁴, 10⁻³, 0.01, 0.02, 0.03, 0.04, 0.05, 0.06, 0.07, 0.08, 0.09, 0.1, 0.2, 0.3, 0.4, 0.5, 0.6, 0.7, 0.8, 0.9, 1, 2, 3, 4, 5, 6, 7, 8, 9, 10, 11, 12, 13, 14, 15, 20, 25, 30, 35, 40, 45, 50, 55, 60, 65, 70, 75, 80, 85, 90, 95, 96, 97, 98 or at least 99% of the total protein mass in the sample. In some embodiments, the abundant protein is present at less than 10⁻⁵% of the total protein mass in the sample, e.g., in the case of a rare target of interest. As described herein, in the case of blood or a derivative thereof, the one or more abundant protein may comprise one or more of albumin, IgG, transferrin, fibrinogen, fibrin, IgA, α2-Marcroglobulin, IgM, al-Antitrypsin, complement C3, haptoglobulin, apolipoprotein A1, A3 and B; al-Acid Glycoprotein, ceruloplasmin, complement C4, C1q, IgD, prealbumin (transthyretin), plasminogen, a derivative of any thereof, and a combination thereof. The one or more abundant protein in blood or a blood derivative may also comprise one or more of Albumin, Immunoglobulins, Fibrinogen, Prealbumin, Alpha 1 antitrypsin, Alpha 1 acid glycoprotein, Alpha 1 fetoprotein, Haptoglobin, Alpha 2 macroglobulin, Ceruloplasmin, Transferrin, complement proteins C3 and C4, Beta 2 microglobulin, Beta lipoprotein, Gamma globulin proteins, C-reactive protein (CRP), Lipoproteins (chylomicrons, VLDL, LDL, HDL), other globulins (types alpha, beta and gamma), Prothrombin, Mannose-binding lectin (MBL), a derivative of any thereof, and a combination thereof.

[0206] In some embodiments, selectively depleting the one or more abundant protein comprises contacting the biological sample with thromboplastin to initiate precipitation of fibrin. The one or more abundant protein may also be depleted by immunoaffinity, precipitation, or a combination thereof. For example, the sample can be treated with thromboplastin to precipitate fibrin, and then the sample may be passed through a column to remove HSA, IgG, and other abundant proteins as desired.

[0207] “Selectively depleting” the one or more abundant protein comprises depleting the abundant protein from the sample at a higher percentage than depletion another entity in the sample, such as another protein or microvesicle, including a target of interest for downstream processing or analysis. Selectively depleting the one or more abundant protein may comprise depleting the abundant protein at a 1.1-fold, 1.2-fold, 1.3-fold, 1.4-fold, 1.5-fold, 1.6-fold, 1.7-fold, 1.8-fold, 1.9-fold, 2-fold, 3-fold, 4-fold, 5-fold, 6-fold, 7-fold, 8-fold, 9-fold, 10-fold, 11-fold, 12-fold, 13-fold, 14-fold, 15-fold, 16-fold, 17-fold, 18-fold, 19-fold, 20-fold, 25-fold, 30-fold, 40-fold, 50-fold, 60-fold, 70-fold, 80-fold, 90-fold, 100-fold, 200-fold, 300-fold, 400-fold, 500-fold, 600-fold, 700-fold, 800-fold, 900-fold, 1000-fold, 10⁴-fold, 10⁵-fold, 10⁶-fold, 10⁷-fold, 10⁸-fold, 10⁹-fold, 10¹⁰-fold, 10¹¹-fold, 10¹²-fold, 10¹³-fold, 10¹⁴-fold, 10¹⁵-fold, 10¹⁶-fold, 10¹⁷-fold, 10¹⁸-fold, 10¹⁹-fold, 10²⁰-fold, or higher rate than another entity in the sample, such as another protein or microvesicle, including a target of interest for downstream processing or analysis. In an embodiment, there is little to no observable depletion of the target of interest as compared to the depletion of the abundant protein. In some embodiments, selectively depleting the one or more abundant protein from the biological sample comprises depleting at least 25%, 30%, 35%, 40%, 45%, 50%, 55%, 60%, 65%, 70%, 75%, 80%, 85%, 90%, 91%, 92%, 93%, 94%, 95%, 96%, 97%, 98%, 99% or 100% of the one or more abundant protein.

[0208] Removal of highly abundant proteins and other non-desired entities can further be facilitated with a non-stringent size exclusion step. For example, the sample can be processed using a high molecular weight cutoff size exclusion step to preferentially enrich high molecular weight vesicles apart from lower molecular weight proteins and other entities. In some embodiments, a sample is processed with a column (e.g., a gel filtration column) or filter having a molecular weight cutoff (MWCO) of 500, 600, 700, 800, 900, 1000, 1500, 2000, 2500, 3000, 3500, 4000, 4500, 5000, 5500, 6000, 6500, 7000, 7500, 8000, 8500, 9000, 9500, 10000, or greater than 10000 kiloDaltons (kDa). In an embodiment, a 700 kDa filtration column is used. In such a step, the vesicles will be retained or flow more slowly than the column or filter than the lower molecular weight entities. Such columns and filters are known in the art.

[0209] Isolation or enrichment of a vesicle from a biological sample can also be enhanced by use of sonication (for example, by applying ultrasound), detergents, other membrane-activating agents, or any combination thereof. For example, ultrasonic energy can be applied to a potential tumor site, and without being bound by theory, release of vesicles from a tissue can be increased, allowing an enriched population of vesicles that can be analyzed or assessed from a biological sample using one or more methods disclosed herein.

[0210] With methods of detecting circulating biomarkers as described here, e.g., antibody affinity isolation, the consistency of the results can be optimized as desired using various concentration or isolation procedures. Such steps can include agitation such as shaking or vortexing, different isolation techniques such as polymer based isolation, e.g., with PEG, and concentration to different levels during filtration or other steps. It will be understood by those in the art that such treatments can be applied at various stages of testing the vesicle containing sample. In one embodiment, the sample itself, e.g., a bodily fluid such as plasma or serum, is vortexed. In some embodiments, the sample is vortexed after one or more sample treatment step, e.g., vesicle isolation, has occurred. Agitation can occur at some or all appropriate sample treatment steps as desired. Additives can be introduced at the various steps to improve the process, e.g., to control aggregation or degradation of the biomarkers of interest.

[0211] The results can also be optimized as desirable by treating the sample with various agents. Such agents include additives to control aggregation and/or additives to adjust pH or ionic strength. Additives that control aggregation include blocking agents such as bovine serum albumin (BSA), milk or StabilGuard® (a BSA-free blocking agent; Product code SG02, Surmodics, Eden Prairie, Minn.), chaotropic agents such as guanidium hydro chloride, and detergents or surfactants. Useful ionic detergents include sodium dodecyl sulfate (SDS, sodium lauryl sulfate (SLS)), sodium laureth sulfate (SLS, sodium lauryl ether sulfate (SLES)), ammonium lauryl sulfate (ALS), cetrimonium bromide, cetrimonium chloride, cetrimonium stearate, and the like. Useful non-ionic (zwitterionic) detergents include polyoxyethylene glycols, polysorbate 20 (also known as Tween 20), other polysorbates (e.g., 40, 60, 65, 80, etc), Triton-X (e.g., X100, X114), 3-[(3-cholamidopropyl)dimethylammonio]-1-propanesulfonate (CHAPS), CHAPSO, deoxycholic acid, sodium deoxycholate, NP-40, glycosides, octyl-thio-glucosides, maltosides, and the like. In some embodiments, Pluronic F-68, a surfactant shown to reduce platelet aggregation, is used to treat samples containing vesicles during isolation and/or detection. F68 can be used from a 0.1% to 10% concentration, e.g., a 1%, 2.5% or 5% concentration. The pH and/or ionic strength of the solution can be adjusted with various acids, bases, buffers or salts, including without limitation sodium chloride (NaCl), phosphate-buffered saline (PBS), tris-buffered saline (TBS), sodium phosphate, potassium chloride, potassium phosphate, sodium citrate and saline-sodium citrate (SSC) buffer. In some embodiments, NaCl is added at a concentration of 0.1% to 10%, e.g., 1%, 2.5% or 5% final concentration. In some embodiments, Tween 20 is added to 0.005 to 2% concentration, e.g., 0.05%, 0.25% or 0.5% final concentration. Blocking agents for use with the invention comprise inert proteins, e.g., milk proteins, non-fat dry milk protein, albumin, BSA, casein, or serum such as newborn calf serum (NBCS), goat serum, rabbit serum or salmon serum. The proteins can be added at a 0.1% to 10% concentration, e.g., 1%, 2%, 3%, 3.5%, 4%, 5%, 6%, 7%, 8%, 9% or 10% concentration. In some embodiments, BSA is added to 0.1% to 10% concentration, e.g., 1%, 2%, 3%, 3.5%, 4%, 5%, 6%, 7%, 8%, 9% or 10% concentration. In an embodiment, the sample is treated according to the methodology presented in U.S. patent application Ser. No. 11/632,946, filed Jul. 13, 2005, which application is incorporated herein by reference in its entirety. Commercially available blockers may be used, such as SuperBlock, StartingBlock, Protein-Free from Pierce (a division of Thermo Fisher Scientific, Rockford, Ill.). In some embodiments, SSC/detergent (e.g., 20×SSC with 0.5% Tween 20 or 0.1% Triton-X 100) is added to 0.1% to 10% concentration, e.g., at 1.0% or 5.0% concentration.

[0212] The methods of detecting vesicles and other circulating biomarkers can be optimized as desired with various combinations of protocols and treatments as described herein. A detection protocol can be optimized by various combinations of agitation, isolation methods, and additives. In some embodiments, the patient sample is vortexed before and after isolation steps, and the sample is treated with blocking agents including BSA and/or F68. Such treatments may reduce the formation of large aggregates or protein or other biological debris and thus provide a more consistent detection reading.

[0213] Filtration and Ultrafiltration

[0214] A vesicle can be isolated from a biological sample by filtering a biological sample from a subject through a filtration module and collecting from the filtration module a retentate comprising the vesicle, thereby isolating the vesicle from the biological sample. The method can comprise filtering a biological sample from a subject through a filtration module comprising a filter (also referred to herein as a selection membrane); and collecting from the filtration module a retentate comprising the vesicle, thereby isolating the vesicle from the biological sample. For example, in one embodiment, the filter retains molecules greater than about 100 kiloDaltons. In such cases, microvesicles are generally found within the retentate of the filtration process whereas smaller entities such as proteins, protein complexes, nucleic acids, etc, pass through into the filtrate.

[0215] The method can be used when determining a biosignature of one or more microvesicle. The method can also further comprise contacting the retentate from the filtration to a plurality of substrates, wherein each substrate is coupled to one or more capture agents, and each subset of the plurality of substrates comprises a different capture agent or combination of capture agents than another subset of the plurality of substrates.

[0216] Also provided herein is a method of determining a biosignature of a vesicle in a sample comprising: filtering a biological sample from a subject with a disorder through a filtration module, collecting from the filtration module a retentate comprising one or more vesicles, and determining a biosignature of the one or more vesicles. In one embodiment, the filtration module comprises a filter that retains molecules greater than about 100 or 150 kiloDaltons.

[0217] The method disclosed herein can further comprise characterizing a phenotype in a subject by filtering a biological sample from a subject through a filtration module, collecting from the filtration module a retentate comprising one or more vesicles; detecting a biosignature of the one or more vesicles; and characterizing a phenotype in the subject based on the biosignature, wherein characterizing is with at least 70% sensitivity. In some embodiments, characterizing comprises determining an amount of one or more vesicle having the biosignature. Furthermore, the characterizing can be from about 80% to 100% sensitivity.

[0218] Also provided herein is a method for multiplex analysis of a plurality of vesicles. In some embodiments, the method comprises filtering a biological sample from a subject through a filtration module; collecting from the filtration module a retentate comprising the plurality of vesicles, applying the plurality of vesicles to a plurality of capture agents, wherein the plurality of capture agents is coupled to a plurality of substrates, and each subset of the plurality of substrates is differentially labeled from another subset of the plurality of substrates; capturing at least a subset of the plurality of vesicles; and determining a biosignature for at least a subset of the captured vesicles. In one embodiment, each substrate is coupled to one or more capture agents, and each subset of the plurality of substrates comprises a different capture agent or combination of capture agents as compared to another subset of the plurality of substrates. In some embodiments, at least a subset of the plurality of substrates is intrinsically labeled, such as comprising one or more labels. The substrate can be a particle or bead, or any combination thereof. In some embodiments, the filter retains molecules greater than 1, 2, 3, 4, 5, 6, 7, 8, 9, 10, 15, 20, 25, 30, 40, 50, 60, 70, 80, 90, 100, 110, 120, 130, 140, 150, 160, 170, 180, 190, 200, 250, 300, 400, 500, 600, 700, 800, 900, 1000, 1500, 2000, 2500, 3000, 3500, 4000, 4500, 5000, 5500, 6000, 6500, 7000, 7500, 8000, 8500, 9000, 9500, 10000, or greater than 10000 kiloDaltons (kDa). In one embodiment, the filtration module comprises a filter that retains molecules greater than about 100 or 150 kiloDaltons. In one embodiment, the filtration module comprises a filter that retains molecules greater than about 9, 20, 100 or 150 kiloDaltons. In still another embodiment, the filtration module comprises a filter that retains molecules greater than about 7000 kDa.

[0219] In some embodiments, the method for multiplex analysis of a plurality of vesicles comprises filtering a biological sample from a subject through a filtration module, wherein the filtration module comprises a filter that retains molecules greater than about 100 kiloDaltons; collecting from the filtration module a retentate comprising the plurality of vesicles; applying the plurality of vesicles to a plurality of capture agents, wherein the plurality of capture agents is coupled to a microarray; capturing at least a subset of the plurality of vesicles on the microarray; and determining a biosignature for at least a subset of the captured vesicles. In some embodiments, the filter retains molecules greater than 1, 2, 3, 4, 5, 6, 7, 8, 9, 10, 15, 20, 25, 30, 40, 50, 60, 70, 80, 90, 100, 110, 120, 130, 140, 150, 160, 170, 180, 190, 200, 250, 300, 400, 500, 600, 700, 800, 900, 1000, 1500, 2000, 2500, 3000, 3500, 4000, 4500, 5000, 5500, 6000, 6500, 7000, 7500, 8000, 8500, 9000, 9500, 10000, or greater than 10000 kiloDaltons (kDa). In one embodiment, the filtration module comprises a filter that retains molecules greater than about 100 or 150 kiloDaltons. In one embodiment, the filtration module comprises a filter that retains molecules greater than about 9, 20, 100 or 150 kiloDaltons. In still another embodiment, the filtration module comprises a filter that retains molecules greater than about 7000 kDa.

[0220] The biological sample can be clarified prior to isolation by filtration. Clarification comprises selective removal of cellular debris and other undesirable materials. For example, cellular debris and other components that may interfere with detection of the circulating biomarkers can be removed. The clarification can be by low-speed centrifugation, such as at about 5,000×g, 4,000×g, 3,000×g, 2,000×g, 1,000×g, or less. The supernatant, or clarified biological sample, containing the vesicle can then be collected and filtered to isolate the vesicle from the clarified biological sample. In some embodiments, the biological sample is not clarified prior to isolation of a vesicle by filtration.

[0221] In some embodiments, isolation of a vesicle from a sample does not use high-speed centrifugation, such as ultracentrifugation. For example, isolation may not require the use of centrifugal speeds, such as about 100,000×g or more. In some embodiments, isolation of a vesicle from a sample uses speeds of less than 50,000×g, 40,000×g, 30,000×g, 20,000×g, 15,000×g, 12,000×g, or 10,000×g.

[0222] Any number of applicable filter configurations can be used to filter a sample of interest. In some embodiments, the filtration module used to isolate the circulating biomarkers from the biological sample is a fiber-based filtration cartridge. For example, the fiber can be a hollow polymeric fiber, such as a polypropylene hollow fiber. A biological sample can be introduced into the filtration module by pumping the sample fluid, such as a biological fluid as disclosed herein, into the module with a pump device, such as a peristaltic pump. The pump flow rate can vary, such as at about 0.25, 0.5, 1, 1.5, 2, 2.5, 3, 3.5, 4, 4.5, 5, 6, 7, 8, 9, or 10 mL/minute. The flow rate can be adjusted given the configuration, e.g., size and throughput, of the filtration module.

[0223] The filtration module can be a membrane filtration module. For example, the membrane filtration module can comprise a filter disc membrane, such as a hydrophilic polyvinylidene difluoride (PVDF) filter disc membrane housed in a stirred cell apparatus (e.g., comprising a magnetic stirrer). In some embodiments, the sample moves through the filter as a result of a pressure gradient established on either side of the filter membrane.

[0224] The filter can comprise a material having low hydrophobic absorptivity and/or high hydrophilic properties. For example, the filter can have an average pore size for vesicle retention and permeation of most proteins as well as a surface that is hydrophilic, thereby limiting protein adsorption. For example, the filter can comprise a material selected from the group consisting of polypropylene, PVDF, polyethylene, polyfluoroethylene, cellulose, secondary cellulose acetate, polyvinylalcohol, and ethylenevinyl alcohol (EVAL®, Kuraray Co., Okayama, Japan). Additional materials that can be used in a filter include, but are not limited to, polysulfone and polyethersulfone.

[0225] The filtration module can have a filter that retains molecules greater than about 1, 2, 3, 4, 5, 6, 7, 8, 9, 10, 15, 20, 25, 30, 40, 50, 60, 70, 80, 90, 100, 110, 120, 130, 140, 150, 160, 170, 180, 190, 200, 250, 300, 400, 500, 600, 700, 800, or 900 kiloDaltons (kDa), such as a filter that has a MWCO (molecular weight cut off) of about 1, 2, 3, 4, 5, 6, 7, 8, 9, 10, 15, 20, 25, 30, 40, 50, 60, 70, 80, 90, 100, 110, 120, 130, 140, 150, 160, 170, 180, 190, 200, 250, 300, 400, 500, 600, 700, 800, or 900 kDa, respectively. In embodiments, the filtration module has a MWCO of 1000 kDa, 1500 kDa, 2000 kDa, 2500 kDa, 3000 kDa, 3500 kDa, 4000 kDa, 4500 kDa, 5000 kDa, 5500 kDa, 6000 kDa, 6500 kDa, 7000 kDa, 7500 kDa, 8000 kDa, 8500 kDa, 9000 kDa, 9500 kDa, 10000 kDa, or greater than 10000 kDa. Ultrafiltration membranes with a range of MWCO of 9 kDa, 20 kDa and/or 150 kDa can be used. In some embodiments, the filter within the filtration module has an average pore diameter of about 0.01 μm to about 0.15 μm, and in some embodiments from about 0.05 μm to about 0.12 μm. In some embodiments, the filter has an average pore diameter of about 0.06 μm, 0.07 μm, 0.08 μm, 0.09 μm, 0.1 μm, 0.11 μm or 0.2 μm.

[0226] The filtration module can be a commerically available column, such as a column typically used for concentrating proteins or for isolating proteins (e.g., ultrafiltration). Examples include, but are not limited to, columns from Millpore (Billerica, Mass.), such as Amicon® centrifugal filters, or from Pierce® (Rockford, Ill.), such as Pierce Concentrator filter devices. Useful columns from Pierce include disposable ultrafiltration centrifugal devices with a MWCO of 9 kDa, 20 kDa and/or 150 kDa. These concentrators consist of a high-performance regenerated cellulose membrane welded to a conical device. The filters can be as described in U.S. Pat. No. 6,269,957 or 6,357,601, both of which applications are incorporated by reference in their entirety herein.

[0227] The retentate comprising the isolated vesicle can be collected from the filtration module. The retentate can be collected by flushing the retentate from the filter. Selection of a filter composition having hydrophilic surface properties, thereby limiting protein adsorption, can be used, without being bound by theory, for easier collection of the retentate and minimize use of harsh or time-consuming collection techniques.

[0228] The collected retentate can then be used subsequent analysis, such as assessing a biosignature of one or more vesicles in the retentate, as further described herein. The analysis can be directly performed on the collected retentate. Alternatively, the collected retentate can be further concentrated or purified, prior to analysis of one or more vesicles. For example, the retentate can be further concentrated or vesicles further isolated from the retentate using size exclusion chromatography, density gradient centrifugation, differential centrifugation, immunoabsorbent capture, affinity purification, microfluidic separation, or combinations thereof, such as described herein. In some embodiments, the retentate can undergo another step of filtration. Alternatively, prior to isolation of a vesicle using a filter, the vesicle is concentrated or isolated using techniques including without limitation size exclusion chromatography, density gradient centrifugation, differential centrifugation, immunoabsorbent capture, affinity purification, microfluidic separation, or combinations thereof.

[0229] Combinations of filters can be used for concentrating and isolating biomarkers. For example, the biological sample may first be filtered through a filter having a porosity or pore size of between about 0.01 μm to about 10 μm, e.g., 0.01 μm to about 2 μm or about 0.05 μm to about 1.5 μm, and then the sample is filtered. For example, prior to filtering a biological sample through a filtration module with a filter that retains molecules greater than about 1, 2, 3, 4, 5, 6, 7, 8, 9, 10, 15, 20, 25, 30, 40, 50, 60, 70, 80, 90, 100, 110, 120, 130, 140, 150, 160, 170, 180, 190, 200, 250, 300, 400, 500, 600, 700, 800, 900, 1000, 1500, 2000, 2500, 3000, 3500, 4000, 4500, 5000, 5500, 6000, 6500, 7000, 7500, 8000, 8500, 9000, 9500, 10000, or greater than 10000 kiloDaltons (kDa), such as a filter that has a MWCO (molecular weight cut off) of about 1, 2, 3, 4, 5, 6, 7, 8, 9, 10, 15, 20, 25, 30, 40, 50, 60, 70, 80, 90, 100, 110, 120, 130, 140, 150, 160, 170, 180, 190, 200, 250, 300, 400, 500, 600, 700, 800, 900, 1000, 1500, 2000, 2500, 3000, 3500, 4000, 4500, 5000, 5500, 6000, 6500, 7000, 7500, 8000, 8500, 9000, 9500, 10000, or greater than 10000 kDa, respectively, the biological sample may first be filtered through a filter having a porosity or pore size of between about 0.01 μm to about 10 μm, e.g., 0.01 μm to about 2 μm or about 0.05 μm to about 1.5 μm. In some embodiments, the filter has a pore size of about 0.01, 0.02, 0.03, 0.04, 0.05, 0.06, 0.07, 0.08, 0.09, 0.1, 0.2, 0.3, 0.4, 0.5, 0.6, 0.7, 0.8, 0.9, 1.0, 1.1, 1.2, 1.3, 1.4, 1.5, 1.6, 1.7, 1.8, 1.9 or 2.0, 3.0, 4.0, 5.0, 6.0, 7.0, 8.0, 9.0 or 10.0 μm. The filter may be a syringe filter. Thus, in one embodiment, the method comprises filtering the biological sample through a filter, such as a syringe filter, wherein the syringe filter has a porosity of greater than about 1 μm, prior to filtering the sample through a filtration module comprising a filter that retains molecules greater than about 100 or 150 kiloDaltons. In an embodiment, the filter is 1.2 μM filter and the filtration is followed by passage of the sample through a 7 ml or 20 ml concentrator column with a 150 kDa cutoff. Multiple concentrator columns may be used, e.g., in series. For example, a 7000 MWCO filtration unit can be used before a 150 MWCO unit.

[0230] The filtration module can be a component of a microfluidic device. Microfluidic devices, which may also be referred to as “lab-on-a-chip” systems, biomedical micro-electro-mechanical systems (bioMEMs), or multicomponent integrated systems, can be used for isolating, and analyzing, vesicles. Such systems miniaturize and compartmentalize processes that allow for binding of vesicles, detection of biomarkers, and other processes, such as further described herein.

[0231] The filtration module and assessment can be as described in Grant, R., et al., A filtration-based protocol to isolate human Plasma Membrane-derived Vesicles and exosomes from blood plasma, J Immunol Methods (2011) 371:143-51 (Epub 2011 Jun. 30), which reference is incorporated herein by reference in its entirety.

[0232] A microfluidic device can also be used for isolation of a vesicle by comprising a filtration module. For example, a microfluidic device can use one more channels for isolating a vesicle from a biological sample based on size from a biological sample. A biological sample can be introduced into one or more microfluidic channels, which selectively allows the passage of vesicles. The microfluidic device can further comprise binding agents, or more than one filtration module to select vesicles based on a property of the vesicles, for example, size, shape, deformability, biomarker profile, or biosignature.

[0233] The retentate from a filtration step can be further processed before assessment of microvesicles or other biomarkers therein. In an embodiment, the retentate is diluted prior to biomarker assessment, e.g., with an appropriate diluent such as a biologically compatible buffer. In some cases, the retentate is serially diluted. In an aspect, the invention provides a method for detecting a microvesicle population from a biological sample comprising: a) concentrating the biological sample using a selection membrane having a pore size of from 0.01 μm to about 10 μm, or a molecular weight cut off (MWCO) from about 1 kDa to 10000 kDa; b) diluting a retentate from the concentration step into one or more aliquots; and c) contacting each of the one or more aliquots of retentate with one or more binding agent specific to a molecule of at least one microvesicle in the microvesicle population. In a related aspect, the invention provides a method for detecting a microvesicle population from a biological sample comprising: a) concentrating the biological sample using a selection membrane having a pore size of from 0.01 μm to about 10 μm, or a molecular weight cut off (MWCO) from about 1 kDa to 10000 kDa; and b) contacting one or more aliquots of the retentate from the concentrating step with one or more binding agent specific to a molecule of at least one microvesicle in the microvesicle population.

[0234] The selection membrane can be sized to retain the desired biomarkers in the retentate or to allow the desired biomarkers to pass through the filter into the filtrate. The filter membrane can be chosen to have a certain pore size or MWCO value. The selection membrane can have a pore size of about 0.01, 0.02, 0.03, 0.04, 0.05, 0.06, 0.07, 0.08, 0.09, 0.1, 0.2, 0.3, 0.4, 0.5, 0.6, 0.7, 0.8, 0.9, 1.0, 1.1, 1.2, 1.3, 1.4, 1.5, 1.6, 1.7, 1.8, 1.9 or 2.0, 3.0, 4.0, 5.0, 6.0, 7.0, 8.0, 9.0 or 10.0 μm. The selection membrane can also have a MWCO of about 1, 2, 3, 4, 5, 6, 7, 8, 9, 10, 15, 20, 25, 30, 40, 50, 60, 70, 80, 90, 100, 110, 120, 130, 140, 150, 160, 170, 180, 190, 200, 250, 300, 400, 500, 600, 700, 800, 900, 1000, 2000, 3000, 4000, 5000, 6000, 7000, 8000, 9000 or 10000 kDa.

[0235] The retentate can be separated and/or diluted into any number of desired aliquots. For example, multiple aliquots without any dilution or the same dilution can be used to determine reproducibility. In another example, multiple aliquots at different dilutions can be used to construct a concentration curve. In an embodiment, the retentate is separated and/or diluted into at least 1, 2, 3, 4, 5, 6, 7, 8, 9, 10, 11, 12, 13, 14, 15, 16, 17, 18, 19, 20, 25, 30, 35, 40, 45, 50, 55, 60, 65, 70, 75, 80, 85, 90, 95, 100, 150, 200, 250, 300, 350 or 400 aliquots. The aliquots can be at a same dilution or at different dilutions.

[0236] A dilution factor is the ratio of the final volume of a mixture (the mixture of the diluents and aliquot) divided by the initial volume of the aliquot. The retentate can be diluted into one or more aliquots at a dilution factor of about 0, 1, 2, 3, 4, 5, 6, 7, 8, 9, 10, 15, 20, 25, 30, 40, 50, 60, 70, 80, 90, 100, 110, 120, 130, 140, 150, 160, 170, 180, 190, 200, 250, 300, 400, 500, 600, 700, 800, 900, 1000, 1500, 2000, 2500, 3000, 3500, 4000, 4500, 5000, 5500, 6000, 6500, 7000, 7500, 8000, 8500, 9000, 9500, 10000, 20000, 30000, 40000, 50000, 60000, 70000, 80000, 90000 and/or 100000. For example, the retentate can be diluted into one or more aliquot at a dilution factor of about 500.

[0237] To estimate a concentration or form a curve, the retentate can be diluted into multiple aliquots. In an embodiment of the method, the retentate is diluted into one or more aliquots at a dilution factor of about 100, 250, 500, 1000, 10000 and 100000. As desired, the method can further comprise detecting an amount of microvesicles in each aliquot of retentate, e.g., that formed a complex with the one or more binding agent. The curve can be used to determine a linear range of the amount of microvesicles in each aliquot detected versus dilution factor. A concentration of the detected microvesicles for the biological sample can be determined using the amount of microvesicles determined in one or more aliquot within the linear range. The concentration can be compared to a reference concentration, e.g., in order to characterize a phenotype as described herein.

[0238] The invention also provides a related method comprising filtering a biological sample from a subject through a filtration module and collecting a filtrate comprising the vesicle, thereby isolating the vesicle from the biological sample. In such cases cells and other large entities can be retained in the retentate while microvesicles pass through into the filtrate. It will be appreciated that strategies to retain and filter microvesicles can be used in concert. For example, a sample can be filtered with a selection membrane that allows microvesicles to pass through, thereby isolating the microvesicles from large particles (cells, complexes, etc). The filtrate comprising the microvesicle can then be filtered using a selection membrane that retains microvesicles, thereby isolating the microvesicles from smaller particles (proteins, nucleic acids, etc). The isolated microvesicles can be further assessed according to the methods of the invention, e.g., to characterize a phenotype.

[0239] Precipitation

[0240] Vesicles can be isolated using a polymeric precipitation method. The method can be in combination with or in place of the other isolation methods described herein. In one embodiment, the sample containing the vesicles is contacted with a formulation of polyethylene glycol (PEG). The polymeric formulation is incubated with the vesicle containing sample then precipitated by centrifugation. The PEG can bind to the vesicles and can be treated to specifically capture vesicles by addition of a capture moiety, e.g., a pegylated-binding protein such as an antibody. One of skill will appreciate that other polymers in addition to PEG can be used, e.g., PEG derivatives including methoxypolyethylene glycols, poly (ethylene oxide), and various polymers of formula HO—CH₂—(CH₂—O—CH₂-)n-CH₂—OH having different molecular weights. The efficiency of isolation may depend on various factors including the length of the polymer chains and concentration of polymer used. In preferred embodiments, PEG4000 or PEG 8000 may be used at a concentration of 1%, 2%, 3%, 4%, 5%, 6%, 7%, 8%, 9%, or 10%, e.g., 4% or 8%.

[0241] In some embodiments of the invention, the vesicles are concentrated from a sample using the polymer precipitation method and the isolated vesicles are further separated using another approach. The second step can be used to identify a subpopulation of vesicles, e.g., that display certain biomarkers. The second separation step can comprise size exclusion, a binding agent, an antibody capture step, microbeads, as described herein.

[0242] In an embodiment, vesicles are isolated according to the ExoQuick™ and ExoQuick-TC™ kits from System Biosciences, Mountain View, Calif. USA. These kits use a polymer-based precipitation method to pellet vesicles. Similarly, the vesicles can be isolated using the Total Exosome Isolation (from Serum) or Total Exosome Isolation (from Cell Culture Media) kits from Invitrogen/Life Technologies (Carlsbad, Calif. USA). The Total Exosome Isolation reagent forces less-soluble components such as vesicles out of solution, allowing them to be collected by a short, low-speed centrifugation. The reagent is added to the biological sample, and the solution is incubated overnight at 2° C. to 8° C. The precipitated vesicles are recovered by standard centrifugation.

[0243] Binding Agents

[0244] Binding agents (also referred to as binding reagents) include agents that are capable of binding a target biomarker. A binding agent can be specific for the target biomarker, meaning the agent is capable of binding a target biomarker. The target can be any useful biomarker disclosed herein, such as a biomarker on the vesicle surface. In some embodiments, the target is a single molecule, such as a single protein, so that the binding agent is specific to the single protein. In other embodiments, the target can be a group of molecules, such as a family or proteins having a similar epitope or moiety, so that the binding agent is specific to the family or group of proteins. The group of molecules can also be a class of molecules, such as protein, DNA or RNA. The binding agent can be a capture agent used to capture a vesicle by binding a component or biomarker of a vesicle. In some embodiments, a capture agent comprises an antibody or fragment thereof, or an aptamer, that binds to an antigen on a vesicle. The capture agent can be optionally coupled to a substrate and used to isolate a vesicle, as further described herein.

[0245] A binding agent is an agent that binds to a circulating biomarker, such as a vesicle or a component of a vesicle. The binding agent can be used as a capture agent and/or a detection agent. A capture agent can bind and capture a circulating biomarker, such as by binding a component or biomarker of a vesicle. For example, the capture agent can be a capture antibody or capture antigen that binds to an antigen on a vesicle. A detection agent can bind to a circulating biomarker thereby facilitating detection of the biomarker. For example, a capture agent comprising an antibody or aptamer that is sequestered to a substrate can be used to capture a vesicle in a sample, and a detection agent comprising an antibody or aptamer that carries a label can be used to detect the captured vesicle via detection of the detection agent's label. In some embodiments, a vesicle is assessed using capture and detection agents that recognize the same vesicle biomarkers. For example, a vesicle population can be captured using a tetraspanin such as by using an anti-CD9 antibody bound to a substrate, and the captured vesicles can be detected using a fluorescently labeled anti-CD9 antibody to label the captured vesicles. In other embodiments, a vesicle is assessed using capture and detection agents that recognize different vesicle biomarkers. For example, a vesicle population can be captured using a cell-specific marker such as by using an anti-PCSA antibody bound to a substrate, and the captured vesicles can be detected using a fluorescently labeled anti-CD9 antibody to label the captured vesicles. Similarly, the vesicle population can be captured using a general vesicle marker such as by using an anti-CD9 antibody bound to a substrate, and the captured vesicles can be detected using a fluorescently labeled antibody to a cell-specific or disease specific marker to label the captured vesicles.

[0246] The biomarkers recognized by the binding agent are sometimes referred to herein as an antigen. Unless otherwise specified, antigen as used herein is meant to encompass any entity that is capable of being bound by a binding agent, regardless of the type of binding agent or the immunogenicity of the biomarker. The antigen further encompasses a functional fragment thereof. For example, an antigen can encompass a protein biomarker capable of being bound by a binding agent, including a fragment of the protein that is capable of being bound by a binding agent.

[0247] In one embodiment, a vesicle is captured using a capture agent that binds to a biomarker on a vesicle. The capture agent can be coupled to a substrate and used to isolate a vesicle, as further described herein. In one embodiment, a capture agent is used for affinity capture or isolation of a vesicle present in a substance or sample.

[0248] A binding agent can be used after a vesicle is concentrated or isolated from a biological sample. For example, a vesicle can first be isolated from a biological sample before a vesicle with a specific biosignature is isolated or detected. The vesicle with a specific biosignature can be isolated or detected using a binding agent for the biomarker. A vesicle with the specific biomarker can be isolated or detected from a heterogeneous population of vesicles. Alternatively, a binding agent may be used on a biological sample comprising vesicles without a prior isolation or concentration step. For example, a binding agent is used to isolate or detect a vesicle with a specific biosignature directly from a biological sample.

[0249] A binding agent can be a nucleic acid, protein, or other molecule that can bind to a component of a vesicle. The binding agent can comprise DNA, RNA, monoclonal antibodies, polyclonal antibodies, Fabs, Fab′, single chain antibodies, synthetic antibodies, aptamers (DNA/RNA), peptoids, zDNA, peptide nucleic acids (PNAs), locked nucleic acids (LNAs), lectins, synthetic or naturally occurring chemical compounds (including but not limited to drugs, labeling reagents), dendrimers, or a combination thereof. For example, the binding agent can be a capture antibody. In embodiments of the invention, the binding agent comprises a membrane protein labeling agent. See, e.g., the membrane protein labeling agents disclosed in Alroy et al., US. Patent Publication US 2005/0158708. In an embodiment, vesicles are isolated or captured as described herein, and one or more membrane protein labeling agent is used to detect the vesicles.

[0250] In some instances, a single binding agent can be employed to isolate or detect a vesicle. In other instances, a combination of different binding agents may be employed to isolate or detect a vesicle. For example, at least 2, 3, 4, 5, 6, 7, 8, 9, 10, 11, 12, 13, 14, 15, 16, 17, 18, 19, 20, 25, 50, 75 or 100 different binding agents may be used to isolate or detect a vesicle from a biological sample. Furthermore, the one or more different binding agents for a vesicle can form a biosignature of a vesicle, as further described below.

[0251] Different binding agents can also be used for multiplexing. For example, isolation or detection of more than one population of vesicles can be performed by isolating or detecting each vesicle population with a different binding agent. Different binding agents can be bound to different particles, wherein the different particles are labeled. In another embodiment, an array comprising different binding agents can be used for multiplex analysis, wherein the different binding agents are differentially labeled or can be ascertained based on the location of the binding agent on the array. Multiplexing can be accomplished up to the resolution capability of the labels or detection method, such as described below. The binding agents can be used to detect the vesicles, such as for detecting cell-of-origin specific vesicles. A binding agent or multiple binding agents can themselves form a binding agent profile that provides a biosignature for a vesicle. One or more binding agents can be selected from FIG. 2 of International Patent Publication No. WO/2011/127219, entitled “Circulating Biomarkers for Disease” and filed Apr. 6, 2011, which application is incorporated by reference in its entirety herein. For example, if a vesicle population is detected or isolated using two, three, four or more binding agents in a differential detection or isolation of a vesicle from a heterogeneous population of vesicles, the particular binding agent profile for the vesicle population provides a biosignature for the particular vesicle population. The vesicle can be detected using any number of binding agents in a multiplex fashion. Thus, the binding agent can also be used to form a biosignature for a vesicle. The biosignature can be used to characterize a phenotype.

[0252] The binding agent can be a lectin. Lectins are proteins that bind selectively to polysaccharides and glycoproteins and are widely distributed in plants and animals. For example, lectins such as those derived from Galanthus nivalis in the form of Galanthus nivalis agglutinin (“GNA”), Narcissus pseudonarcissus in the form of Narcissus pseudonarcissus agglutinin (“NPA”) and the blue green algae Nostoc ellipsosporum called “cyanovirin” (Boyd et al. Antimicrob Agents Chemother 41(7): 1521 1530, 1997; Hammar et al. Ann NY Acad Sci 724: 166 169, 1994; Kaku et al. Arch Biochem Biophys 279(2): 298 304, 1990) can be used to isolate a vesicle. These lectins can bind to glycoproteins having a high mannose content (Chervenak et al. Biochemistry 34(16): 5685 5695, 1995). High mannose glycoprotein refers to glycoproteins having mannose-mannose linkages in the form of α-1→3 or α-1→6 mannose-mannose linkages.

[0253] The binding agent can be an agent that binds one or more lectins. Lectin capture can be applied to the isolation of the biomarker cathepsin D since it is a glycosylated protein capable of binding the lectins Galanthus nivalis agglutinin (GNA) and concanavalin A (ConA).

[0254] Methods and devices for using lectins to capture vesicles are described in International Patent Publications WO/2011/066589, entitled “METHODS AND SYSTEMS FOR ISOLATING, STORING, AND ANALYZING VESICLES” and filed Nov. 30, 2010; WO/2010/065765, entitled “AFFINITY CAPTURE OF CIRCULATING BIOMARKERS” and filed Dec. 3, 2009; WO/2010/141862, entitled “METHODS AND MATERIALS FOR ISOLATING EXOSOMES” and filed Jun. 4, 2010; and WO/2007/103572, entitled “EXTRACORPOREAL REMOVAL OF MICROVESICULAR PARTICLES” and filed Mar. 9, 2007, each of which applications is incorporated by reference herein in its entirety.

[0255] The binding agent can be an antibody. For example, a vesicle may be isolated using one or more antibodies specific for one or more antigens present on the vesicle. For example, a vesicle can have CD63 on its surface, and an antibody, or capture antibody, for CD63 can be used to isolate the vesicle. Alternatively, a vesicle derived from a tumor cell can express EpCam, the vesicle can be isolated using an antibody for EpCam and CD63. Other antibodies for isolating vesicles can include an antibody, or capture antibody, to CD9, PSCA, TNFR, CD63, B7H3, MFG-E8, EpCam, Rab, CD81, STEAP, PCSA, PSMA, or 5T4. Other antibodies for isolating vesicles can include an antibody, or capture antibody, to DR3, STEAP, epha2, TMEM211, MFG-E8, Tissue Factor (TF), unc93A, A33, CD24, NGAL, EpCam, MUC17, TROP2, or TETS.

[0256] In some embodiments, the capture agent is an antibody to CD9, CD63, CD81, PSMA, PCSA, B7H3, EpCam, PSCA, ICAM, STEAP, or EGFR. The capture agent can also be used to identify a biomarker of a vesicle. For example, a capture agent such as an antibody to CD9 would identify CD9 as a biomarker of the vesicle. In some embodiments, a plurality of capture agents can be used, such as in multiplex analysis. The plurality of captures agents can comprise binding agents to one or more of: CD9, CD63, CD81, PSMA, PCSA, B7H3, EpCam, PSCA, ICAM, STEAP, and EGFR. In some embodiments, the plurality of capture agents comprise binding agents to CD9, CD63, CD81, PSMA, PCSA, B7H3, MFG-E8, and/or EpCam. In yet other embodiments, the plurality of capture agents comprises binding agents to CD9, CD63, CD81, PSMA, PCSA, B7H3, EpCam, PSCA, ICAM, STEAP, and/or EGFR. The plurality of capture agents comprises binding agents to TMEM211, MFG-E8, Tissue Factor (TF), and/or CD24.

[0257] The antibodies referenced herein can be immunoglobulin molecules or immunologically active portions of immunoglobulin molecules, i.e., molecules that contain an antigen binding site that specifically binds an antigen and synthetic antibodies. The immunoglobulin molecules can be of any class (e.g., IgG, IgE, IgM, IgD or IgA) or subclass of immunoglobulin molecule. Antibodies include, but are not limited to, polyclonal, monoclonal, bispecific, synthetic, humanized and chimeric antibodies, single chain antibodies, Fab fragments and F(ab′)₂ fragments, Fv or Fv′ portions, fragments produced by a Fab expression library, anti-idiotypic (anti-Id) antibodies, or epitope-binding fragments of any of the above. An antibody, or generally any molecule, “binds specifically” to an antigen (or other molecule) if the antibody binds preferentially to the antigen, and, e.g., has less than about 30%, 20%, 10%, 5% or 1% cross-reactivity with another molecule.

[0258] The binding agent can also be a polypeptide or peptide. Polypeptide is used in its broadest sense and may include a sequence of subunit amino acids, amino acid analogs, or peptidomimetics. The subunits may be linked by peptide bonds. The polypeptides may be naturally occurring, processed forms of naturally occurring polypeptides (such as by enzymatic digestion), chemically synthesized or recombinantly expressed. The polypeptides for use in the methods of the present invention may be chemically synthesized using standard techniques. The polypeptides may comprise D-amino acids (which are resistant to L-amino acid-specific proteases), a combination of D- and L-amino acids, β amino acids, or various other designer or non-naturally occurring amino acids (e.g., β-methyl amino acids, Cα-methyl amino acids, and Na-methyl amino acids, etc.) to convey special properties. Synthetic amino acids may include ornithine for lysine, and norleucine for leucine or isoleucine. In addition, the polypeptides can have peptidomimetic bonds, such as ester bonds, to prepare polypeptides with novel properties. For example, a polypeptide may be generated that incorporates a reduced peptide bond, i.e., R₁—CH₂—NH—R₂, where R₁ and R₂ are amino acid residues or sequences. A reduced peptide bond may be introduced as a dipeptide subunit. Such a polypeptide would be resistant to protease activity, and would possess an extended half-live in vivo. Polypeptides can also include peptoids (N-substituted glycines), in which the side chains are appended to nitrogen atoms along the molecule's backbone, rather than to the α-carbons, as in amino acids. Polypeptides and peptides are intended to be used interchangeably throughout this application, i.e. where the term peptide is used, it may also include polypeptides and where the term polypeptides is used, it may also include peptides. The term “protein” is also intended to be used interchangeably throughout this application with the terms “polypeptides” and “peptides” unless otherwise specified.

[0259] A vesicle may be isolated, captured or detected using a binding agent. The binding agent can be an agent that binds a vesicle “housekeeping protein,” or general vesicle biomarker. The biomarker can be CD63, CD9, CD81, CD82, CD37, CD53, Rab-5b, Annexin V, MFG-E8 or other commonly observed vesicle markers include those listed in Table 3. Furthermore, any of the markers disclosed herein or in Table 3 can be selected in identifying a candidate biosignature for a disease or condition, where the one or more selected biomarkers have a direct or indirect role or function in mechanisms involved in the disease or condition.

[0260] The binding agent can also be an agent that binds to a vesicle derived from a specific cell type, such as a tumor cell (e.g. binding agent for Tissue factor, EpCam, B7H3, RAGE or CD24) or a specific cell-of-origin. The binding agent used to isolate or detect a vesicle can be a binding agent for an antigen selected from FIG. 1 of International Patent Publication No. WO/2011/127219, entitled “Circulating Biomarkers for Disease” and filed Apr. 6, 2011, which application is incorporated by reference in its entirety herein. The binding agent for a vesicle can also be selected from those listed in FIG. 2 of International Patent Publication No. WO/2011/127219. The binding agent can be for an antigen such as a tetraspanin, MFG-E8, Annexin V, 5T4, B7H3, caveolin, CD63, CD9, E-Cadherin, Tissue factor, MFG-E8, TMEM211, CD24, PSCA, PCSA, PSMA, Rab-5B, STEAP, TNFR1, CD81, EpCam, CD59, CD81, ICAM, EGFR, or CD66. A binding agent for a platelet can be a glycoprotein such as GpIa-IIa, GpIIb-IIIa, GpIIb, GpIb, or GpIX. A binding agent can be for an antigen comprisine one or more of CD9, Erb2, Erb4, CD81, Erb3, MUC16, CD63, DLL4, HLA-Drpe, B7H3, IFNAR, 5T4, PCSA, MICB, PSMA, MFG-E8, Muc1, PSA, Muc2, Unc93a, VEGFR2, EpCAM, VEGF A, TMPRSS2, RAGE, PSCA, CD40, Muc17, IL-17-RA, and CD80. For example, the binding agent can be one or more of CD9, CD63, CD81, B7H3, PCSA, MFG-E8, MUC2, EpCam, RAGE and Muc17. One or more binding agents, such as one or more binding agents for two or more of the antigens, can be used for isolating or detecting a vesicle. The binding agent used can be selected based on the desire of isolating or detecting a vesicle derived from a particular cell type or cell-of-origin specific vesicle. The binding agent can be to one or more vesicle marker in Table 4.

[0261] A binding agent can also be linked directly or indirectly to a solid surface or substrate. A solid surface or substrate can be any physically separable solid to which a binding agent can be directly or indirectly attached including, but not limited to, surfaces provided by microarrays and wells, particles such as beads, columns, optical fibers, wipes, glass and modified or functionalized glass, quartz, mica, diazotized membranes (paper or nylon), polyformaldehyde, cellulose, cellulose acetate, paper, ceramics, metals, metalloids, semiconductive materials, quantum dots, coated beads or particles, other chromatographic materials, magnetic particles; plastics (including acrylics, polystyrene, copolymers of styrene or other materials, polypropylene, polyethylene, polybutylene, polyurethanes, polytetrafluoroethylene (PTFE, Teflon®), etc.), polysaccharides, nylon or nitrocellulose, resins, silica or silica-based materials including silicon and modified silicon, carbon, metals, inorganic glasses, plastics, ceramics, conducting polymers (including polymers such as polypyrole and polyindole); micro or nanostructured surfaces such as nucleic acid tiling arrays, nanotube, nanowire, or nanoparticulate decorated surfaces; or porous surfaces or gels such as methacrylates, acrylamides, sugar polymers, cellulose, silicates, or other fibrous or stranded polymers. In addition, as is known the art, the substrate may be coated using passive or chemically-derivatized coatings with any number of materials, including polymers, such as dextrans, acrylamides, gelatins or agarose. Such coatings can facilitate the use of the array with a biological sample.

[0262] For example, an antibody used to isolate a vesicle can be bound to a solid substrate such as a well, such as commercially available plates (e.g. from Nunc, Milan Italy). Each well can be coated with the antibody. In some embodiments, the antibody used to isolate a vesicle is bound to a solid substrate such as an array. The array can have a predetermined spatial arrangement of molecule interactions, binding islands, biomolecules, zones, domains or spatial arrangements of binding islands or binding agents deposited within discrete boundaries. Further, the term array may be used herein to refer to multiple arrays arranged on a surface, such as would be the case where a surface bore multiple copies of an array. Such surfaces bearing multiple arrays may also be referred to as multiple arrays or repeating arrays.

[0263] Arrays typically contain addressable moieties that can detect the presence of an entity, e.g., a vesicle in the sample via a binding event. An array may be referred to as a microarray. Arrays or microarrays include without limitation DNA microarrays, such as cDNA microarrays, oligonucleotide microarrays and SNP microarrays, microRNA arrays, protein microarrays, antibody microarrays, tissue microarrays, cellular microarrays (also called transfection microarrays), chemical compound microarrays, and carbohydrate arrays (glycoarrays). DNA arrays typically comprise addressable nucleotide sequences that can bind to sequences present in a sample. MicroRNA arrays, e.g., the MMChips array from the University of Louisville or commercial systems from Agilent, can be used to detect microRNAs. Protein microarrays can be used to identify protein-protein interactions, including without limitation identifying substrates of protein kinases, transcription factor protein-activation, or to identify the targets of biologically active small molecules. Protein arrays may comprise an array of different protein molecules, commonly antibodies, or nucleotide sequences that bind to proteins of interest. In a non-limiting example, a protein array can be used to detect vesicles having certain proteins on their surface. Antibody arrays comprise antibodies spotted onto the protein chip that are used as capture molecules to detect proteins or other biological materials from a sample, e.g., from cell or tissue lysate solutions. For example, antibody arrays can be used to detect vesicle-associated biomarkers from bodily fluids, e.g., serum or urine. Tissue microarrays comprise separate tissue cores assembled in array fashion to allow multiplex histological analysis. Cellular microarrays, also called transfection microarrays, comprise various capture agents, such as antibodies, proteins, or lipids, which can interact with cells to facilitate their capture on addressable locations. Cellular arrays can also be used to capture vesicles due to the similarity between a vesicle and cellular membrane. Chemical compound microarrays comprise arrays of chemical compounds and can be used to detect protein or other biological materials that bind the compounds. Carbohydrate arrays (glycoarrays) comprise arrays of carbohydrates and can detect, e.g., protein that bind sugar moieties. One of skill will appreciate that similar technologies or improvements can be used according to the methods of the invention.

[0264] A binding agent can also be bound to particles such as beads or microspheres. For example, an antibody specific for a component of a vesicle can be bound to a particle, and the antibody-bound particle is used to isolate a vesicle from a biological sample. In some embodiments, the microspheres may be magnetic or fluorescently labeled. In addition, a binding agent for isolating vesicles can be a solid substrate itself. For example, latex beads, such as aldehyde/sulfate beads (Interfacial Dynamics, Portland, Oreg.) can be used.

[0265] A binding agent bound to a magnetic bead can also be used to isolate a vesicle. For example, a biological sample such as serum from a patient can be collected for colon cancer screening. The sample can be incubated with anti-CCSA-3 (Colon Cancer-Specific Antigen) coupled to magnetic microbeads. A low-density microcolumn can be placed in the magnetic field of a MACS Separator and the column is then washed with a buffer solution such as Tris-buffered saline. The magnetic immune complexes can then be applied to the column and unbound, non-specific material can be discarded. The CCSA-3 selected vesicle can be recovered by removing the column from the separator and placing it on a collection tube. A buffer can be added to the column and the magnetically labeled vesicle can be released by applying the plunger supplied with the column. The isolated vesicle can be diluted in IgG elution buffer and the complex can then be centrifuged to separate the microbeads from the vesicle. The pelleted isolated cell-of-origin specific vesicle can be resuspended in buffer such as phosphate-buffered saline and quantitated. Alternatively, due to the strong adhesion force between the antibody captured cell-of-origin specific vesicle and the magnetic microbeads, a proteolytic enzyme such as trypsin can be used for the release of captured vesicles without the need for centrifugation. The proteolytic enzyme can be incubated with the antibody captured cell-of-origin specific vesicles for at least a time sufficient to release the vesicles.

[0266] A binding agent, such as an antibody, for isolating vesicles is preferably contacted with the biological sample comprising the vesicles of interest for at least a time sufficient for the binding agent to bind to a component of the vesicle. For example, an antibody may be contacted with a biological sample for various intervals ranging from seconds days, including but not limited to, about 10 minutes, 30 minutes, 1 hour, 3 hours, 5 hours, 7 hours, 10 hours, 15 hours, 1 day, 3 days, 7 days or 10 days.

[0267] A binding agent, such as an antibody specific to an antigen listed in FIG. 1 of International Patent Publication No. WO/2011/127219, entitled “Circulating Biomarkers for Disease” and filed Apr. 6, 2011, which application is incorporated by reference in its entirety herein, or a binding agent listed in FIG. 2 of International Patent Publication No. WO/2011/127219, can be labeled to facilitate detection. Appropriate labels include without limitation a magnetic label, a fluorescent moiety, an enzyme, a chemiluminescent probe, a metal particle, a non-metal colloidal particle, a polymeric dye particle, a pigment molecule, a pigment particle, an electrochemically active species, semiconductor nanocrystal or other nanoparticles including quantum dots or gold particles, fluorophores, quantum dots, or radioactive labels. Various protein, radioactive, fluorescent, enzymatic, and other labels are described further above.

[0268] A binding agent can be directly or indirectly labeled, e.g., the label is attached to the antibody through biotin-streptavidin. Alternatively, an antibody is not labeled, but is later contacted with a second antibody that is labeled after the first antibody is bound to an antigen of interest.

[0269] Depending on the method of isolation or detection used, the binding agent may be linked to a solid surface or substrate, such as arrays, particles, wells and other substrates described above. Methods for direct chemical coupling of antibodies, to the cell surface are known in the art, and may include, for example, coupling using glutaraldehyde or maleimide activated antibodies. Methods for chemical coupling using multiple step procedures include biotinylation, coupling of trinitrophenol (TNP) or digoxigenin using for example succinimide esters of these compounds. Biotinylation can be accomplished by, for example, the use of D-biotinyl-N-hydroxysuccinimide. Succinimide groups react effectively with amino groups at pH values above 7, and preferentially between about pH 8.0 and about pH 8.5. Biotinylation can be accomplished by, for example, treating the cells with dithiothreitol followed by the addition of biotin maleimide.

[0270] Particle-Based Assays

[0271] As an alternative to planar arrays, assays using particles or microspheres, such as bead based assays, are capable of use with a binding agent. For example, antibodies or aptamers are easily conjugated with commercially available beads. See, e.g., Fan et al., Illumina universal bead arrays. Methods Enzymol. 2006 410:57-73; Srinivas et al. Anal. Chem. 2011 Oct. 21, Aptamer functionalized Microgel Particles for Protein Detection; See also, review article on aptamers as therapeutic and diagnostic agents, Brody and Gold, Rev. Mol. Biotech. 2000, 74:5-13.

[0272] Multiparametric assays or other high throughput detection assays using bead coatings with cognate ligands and reporter molecules with specific activities consistent with high sensitivity automation can be used. In a bead based assay system, a binding agent for a biomarker or vesicle, such as a capture agent (e.g. capture antibody), can be immobilized on an addressable microsphere. Each binding agent for each individual binding assay can be coupled to a distinct type of microsphere (i.e., microbead) and the assay reaction takes place on the surface of the microsphere, such as depicted in FIG. 2B. A binding agent for a vesicle can be a capture antibody or aptamer coupled to a bead. Dyed microspheres with discrete fluorescence intensities are loaded separately with their appropriate binding agent or capture probes. The different bead sets carrying different binding agents can be pooled as desired to generate custom bead arrays. Bead arrays are then incubated with the sample in a single reaction vessel to perform the assay.

[0273] Various particle/bead substrates and systems useful for the methods of the invention are described further above.

[0274] Flow Cytometry

[0275] In various embodiments of the invention, flow cytometry, which is described in further detail above, is used to assess a microvesicle population in a biological sample. If desired, the microvesicle population can be sorted from other particles (e.g., cell debris, protein aggregates, etc) in a sample by labeling the vesicles using one or more general vesicle marker. The general vesicle marker can be a marker in Table 3. Commonly used vesicle markers include tetraspanins such as CD9, CD63 and/or CD81. Vesicles comprising one or more tetraspanin are sometimes referred to as “Tet+” herein to indicate that the vesicles are tetraspanin-positive. The sorted microvesicles can be further assessed using methodology described herein. E.g., surface antigens on the sorted microvesicles can be detected using flow or other methods. In some embodiments, payload within the sorted microvesicles is assessed. As an illustrative example, a population of microvesicles is contacted with a labeled binding agent to a surface antigen of interest, the contacted microvesicles are sorted using flow cytometry, and payload with the microvesicles is assessed. The payload may be polypeptides, nucleic acids (e.g., mRNA or microRNA) or other biological entities as desired. Such assessment is used to characterize a phenotype as described herein, e.g., to diagnose, prognose or theranose a cancer.

[0276] In an embodiment, flow sorting is used to distinguish microvesicle populations from other biological complexes. In a non-limiting example, Ago2+/Tet+ and Ago2+/Tet− particles are detected using flow methodology to separate Ago2+ vesicles from vesicle-free Ago2+ complexes, respectively.

[0277] Multiplexing

[0278] Multiplex experiments comprise experiments that can simultaneously measure multiple analytes in a single assay. Vesicles and associated biomarkers can be assessed in a multiplex fashion. Different binding agents can be used for multiplexing different circulating biomarkers, e.g., microRNA, protein, or vesicle populations. Different biomarkers, e.g., different vesicle populations, can be isolated or detected using different binding agents. Each population in a biological sample can be labeled with a different signaling label, such as a fluorophore, quantum dot, or radioactive label, such as described above. The label can be directly conjugated to a binding agent or indirectly used to detect a binding agent that binds a vesicle. The number of populations detected in a multiplexing assay is dependent on the resolution capability of the labels and the summation of signals, as more than two differentially labeled vesicle populations that bind two or more affinity elements can produce summed signals.

[0279] Multiplexing of at least 2, 3, 4, 5, 6, 7, 8, 9, 10, 11, 12, 13, 14, 15, 16, 17, 18, 19, 20, 25, 50, 75 or 100 different circulating biomarkers may be performed. For example, one population of vesicles specific to a cell-of-origin can be assayed along with a second population of vesicles specific to a different cell-of-origin, where each population is labeled with a different label. Alternatively, a population of vesicles with a particular biomarker or biosignature can be assayed along with a second population of vesicles with a different biomarker or biosignature. In some cases, hundreds or thousands of vesicles are assessed in a single assay.

[0280] In one embodiment, multiplex analysis is performed by applying a plurality of vesicles comprising more than one population of vesicles to a plurality of substrates, such as beads. Each bead is coupled to one or more capture agents. The plurality of beads is divided into subsets, where beads with the same capture agent or combination of capture agents form a subset of beads, such that each subset of beads has a different capture agent or combination of capture agents than another subset of beads. The beads can then be used to capture vesicles that comprise a component that binds to the capture agent. The different subsets can be used to capture different populations of vesicles. The captured vesicles can then be analyzed by detecting one or more biomarkers.

[0281] Flow cytometry can be used in combination with a particle-based or bead based assay. Multiparametric immunoassays or other high throughput detection assays using bead coatings with cognate ligands and reporter molecules with specific activities consistent with high sensitivity automation can be used. For example, beads in each subset can be differentially labeled from another subset. In a particle based assay system, a binding agent or capture agent for a vesicle, such as a capture antibody, can be immobilized on addressable beads or microspheres. Each binding agent for each individual binding assay (such as an immunoassay when the binding agent is an antibody) can be coupled to a distinct type of microsphere (i.e., microbead) and the binding assay reaction takes place on the surface of the microspheres. Microspheres can be distinguished by different labels, for example, a microsphere with a specific capture agent would have a different signaling label as compared to another microsphere with a different capture agent. For example, microspheres can be dyed with discrete fluorescence intensities such that the fluorescence intensity of a microsphere with a specific binding agent is different than that of another microsphere with a different binding agent. Biomarkers bound by different capture agents can be differentially detected using different labels.

[0282] A microsphere can be labeled or dyed with at least 2 different labels or dyes. In some embodiments, the microsphere is labeled with at least 3, 4, 5, 6, 7, 8, 9, or 10 different labels. Different microspheres in a plurality of microspheres can have more than one label or dye, wherein various subsets of the microspheres have various ratios and combinations of the labels or dyes permitting detection of different microspheres with different binding agents. For example, the various ratios and combinations of labels and dyes can permit different fluorescent intensities. Alternatively, the various ratios and combinations maybe used to generate different detection patters to identify the binding agent. The microspheres can be labeled or dyed externally or may have intrinsic fluorescence or signaling labels. Beads can be loaded separately with their appropriate binding agents and thus, different vesicle populations can be isolated based on the different binding agents on the differentially labeled microspheres to which the different binding agents are coupled.

[0283] In another embodiment, multiplex analysis can be performed using a planar substrate, wherein the substrate comprises a plurality of capture agents. The plurality of capture agents can capture one or more populations of vesicles, and one or more biomarkers of the captured vesicles detected. The planar substrate can be a microarray or other substrate as further described herein.

[0284] Binding Agents

[0285] A vesicle may be isolated or detected using a binding agent for a novel component of a vesicle, such as an antibody for a novel antigen specific to a vesicle of interest. Novel antigens that are specific to a vesicle of interest may be isolated or identified using different test compounds of known composition bound to a substrate, such as an array or a plurality of particles, which can allow a large amount of chemical/structural space to be adequately sampled using only a small fraction of the space. The novel antigen identified can also serve as a biomarker for the vesicle. For example, a novel antigen identified for a cell-of-origin specific vesicle can be a useful biomarker.

[0286] The term “agent” or “reagent” as used in respect to contacting a sample can mean any entity designed to bind, hybridize, associate with or otherwise detect or facilitate detection of a target molecule, including target polypeptides, peptides, nucleic acid molecules, leptins, lipids, or any other biological entity that can be detected as described herein or as known in the art. Examples of such agents/reagents are well known in the art, and include but are not limited to universal or specific nucleic acid primers, nucleic acid probes, antibodies, aptamers, peptoid, peptide nucleic acid, locked nucleic acid, lectin, dendrimer, chemical compound, or other entities described herein or known in the art.

[0287] A binding agent can be identified by screening either a homogeneous or heterogeneous vesicle population against test compounds. Since the composition of each test compound on the substrate surface is known, this constitutes a screen for affinity elements. For example, a test compound array comprises test compounds at specific locations on the substrate addressable locations, and can be used to identify one or more binding agents for a vesicle. The test compounds can all be unrelated or related based on minor variations of a core sequence or structure. The different test compounds may include variants of a given test compound (such as polypeptide isoforms), test compounds that are structurally or compositionally unrelated, or a combination thereof.

[0288] A test compound can be a peptoid, polysaccharide, organic compound, inorganic compound, polymer, lipids, nucleic acid, polypeptide, antibody, protein, polysaccharide, or other compound. The test compound can be natural or synthetic. The test compound can comprise or consist of linear or branched heteropolymeric compounds based on any of a number of linkages or combinations of linkages (e.g., amide, ester, ether, thiol, radical additions, metal coordination, etc.), dendritic structures, circular structures, cavity structures or other structures with multiple nearby sites of attachment that serve as scaffolds upon which specific additions are made. The test compound can be spotted on a substrate or synthesized in situ, using standard methods in the art. In addition, the test compound can be spotted or synthesized in situ in combinations in order to detect useful interactions, such as cooperative binding.

[0289] The test compound can be a polypeptide with known amino acid sequence, thus, detection of a test compound binding with a vesicle can lead to identification of a polypeptide of known amino sequence that can be used as a binding agent. For example, a homogenous population of vesicles can be applied to a spotted array on a slide containing between a few and 1,000,000 test polypeptides having a length of variable amino acids. The polypeptides can be attached to the surface through the C-terminus. The sequence of the polypeptides can be generated randomly from 19 amino acids, excluding cysteine. The binding reaction can include a non-specific competitor, such as excess bacterial proteins labeled with another dye such that the specificity ratio for each polypeptide binding target can be determined. The polypeptides with the highest specificity and binding can be selected. The identity of the polypeptide on each spot is known, and thus can be readily identified. Once the novel antigens specific to the homogeneous vesicle population, such as a cell-of-origin specific vesicle is identified, such cell-of-origin specific vesicles may subsequently be isolated using such antigens in methods described hereafter.

[0290] An array can also be used for identifying an antibody as a binding agent for a vesicle. Test antibodies can be attached to an array and screened against a heterogeneous population of vesicles to identify antibodies that can be used to isolate or identify a vesicle. A homogeneous population of vesicles such as cell-of-origin specific vesicles can also be screened with an antibody array. Other than identifying antibodies to isolate or detect a homogeneous population of vesicles, one or more protein biomarkers specific to the homogenous population can be identified. Commercially available platforms with test antibodies pre-selected or custom selection of test antibodies attached to the array can be used. For example, an antibody array from Full Moon Biosystems can be screened using prostate cancer cell derived vesicles identifying antibodies to Bcl-XL, ERCC1, Keratin 15, CD81/TAPA-1, CD9, Epithelial Specific Antigen (ESA), and Mast Cell Chymase as binding agents, and the proteins identified can be used as biomarkers for the vesicles. The biomarker can be present or absent, underexpressed or overexpressed, mutated, or modified in or on a vesicle and used in characterizing a condition.

[0291] An antibody or synthetic antibody to be used as a binding agent can also be identified through a peptide array. Another method is the use of synthetic antibody generation through antibody phage display. M13 bacteriophage libraries of antibodies (e.g. Fabs) are displayed on the surfaces of phage particles as fusions to a coat protein. Each phage particle displays a unique antibody and also encapsulates a vector that contains the encoding DNA. Highly diverse libraries can be constructed and represented as phage pools, which can be used in antibody selection for binding to immobilized antigens. Antigen-binding phages are retained by the immobilized antigen, and the nonbinding phages are removed by washing. The retained phage pool can be amplified by infection of an Escherichia coli host and the amplified pool can be used for additional rounds of selection to eventually obtain a population that is dominated by antigen-binding clones. At this stage, individual phase clones can be isolated and subjected to DNA sequencing to decode the sequences of the displayed antibodies. Through the use of phase display and other methods known in the art, high affinity designer antibodies for vesicles can be generated.

[0292] Bead-based assays can also be used to identify novel binding agents to isolate or detect a vesicle. A test antibody or peptide can be conjugated to a particle. For example, a bead can be conjugated to an antibody or peptide and used to detect and quantify the proteins expressed on the surface of a population of vesicles in order to discover and specifically select for novel antibodies that can target vesicles from specific tissue or tumor types. Any molecule of organic origin can be successfully conjugated to a polystyrene bead through use of a commercially available kit according to manufacturer's instructions. Each bead set can be colored a certain detectable wavelength and each can be linked to a known antibody or peptide which can be used to specifically measure which beads are linked to exosomal proteins matching the epitope of previously conjugated antibodies or peptides. The beads can be dyed with discrete fluorescence intensities such that each bead with a different intensity has a different binding agent as described above.

[0293] For example, a purified vesicle preparation can be diluted in assay buffer to an appropriate concentration according to empirically determined dynamic range of assay. A sufficient volume of coupled beads can be prepared and approximately 1 μl of the antibody-coupled beads can be aliquoted into a well and adjusted to a final volume of approximately 50 μl. Once the antibody-conjugated beads have been added to a vacuum compatible plate, the beads can be washed to ensure proper binding conditions. An appropriate volume of vesicle preparation can then be added to each well being tested and the mixture incubated, such as for 15-18 hours. A sufficient volume of detection antibodies using detection antibody diluent solution can be prepared and incubated with the mixture for 1 hour or more. The beads can then be washed before the addition of detection antibody (biotin expressing) mixture composed of streptavidin phycoereythin. The beads can then be washed and vacuum aspirated several times before analysis on a suspension array system using software provided with an instrument. The identity of antigens that can be used to selectively extract the vesicles can then be elucidated from the analysis.

[0294] Assays using imaging systems can be used to detect and quantify proteins expressed on the surface of a vesicle in order to discover and specifically select for and enrich vesicles from specific tissue, cell or tumor types. Antibodies, peptides or cells conjugated to multiple well multiplex carbon coated plates can be used. Simultaneous measurement of many analytes in a well can be achieved through the use of capture antibodies arrayed on the patterned carbon working surface. Analytes can then be detected with antibodies labeled with reagents in electrode wells with an enhanced electro-chemiluminescent plate. Any molecule of organic origin can be successfully conjugated to the carbon coated plate. Proteins expressed on the surface of vesicles can be identified from this assay and can be used as targets to specifically select for and enrich vesicles from specific tissue or tumor types.

[0295] The binding agent can also be an aptamer to a specific target. The term “specific” as used herein in regards to a binding agent can mean that an agent has a greater affinity for its target than other targets, typically with a much great affinity, but does not require that the binding agent is absolutely specific for its target.

[0296] Microfluidics

[0297] The methods for isolating or identifying vesicles can be used in combination with microfluidic devices. The methods of isolating or detecting a vesicle, such as described herein, can be performed using a microfluidic device. Microfluidic devices, which may also be referred to as “lab-on-a-chip” systems, biomedical micro-electro-mechanical systems (bioMEMs), or multicomponent integrated systems, can be used for isolating and analyzing a vesicle. Such systems miniaturize and compartmentalize processes that allow for binding of vesicles, detection of biosignatures, and other processes.

[0298] A microfluidic device can also be used for isolation of a vesicle through size differential or affinity selection. For example, a microfluidic device can use one more channels for isolating a vesicle from a biological sample based on size or by using one or more binding agents for isolating a vesicle from a biological sample. A biological sample can be introduced into one or more microfluidic channels, which selectively allows the passage of a vesicle. The selection can be based on a property of the vesicle, such as the size, shape, deformability, or biosignature of the vesicle.

[0299] In one embodiment, a heterogeneous population of vesicles can be introduced into a microfluidic device, and one or more different homogeneous populations of vesicles can be obtained. For example, different channels can have different size selections or binding agents to select for different vesicle populations. Thus, a microfluidic device can isolate a plurality of vesicles wherein at least a subset of the plurality of vesicles comprises a different biosignature from another subset of the plurality of vesicles. For example, the microfluidic device can isolate at least 2, 3, 4, 5, 6, 7, 8, 9, 10, 15, 20, 25, 30, 40, 50, 60, 70, 80, 90, or 100 different subsets of vesicles, wherein each subset of vesicles comprises a different biosignature.

[0300] In some embodiments, the microfluidic device can comprise one or more channels that permit further enrichment or selection of a vesicle. A population of vesicles that has been enriched after passage through a first channel can be introduced into a second channel, which allows the passage of the desired vesicle or vesicle population to be further enriched, such as through one or more binding agents present in the second channel.

[0301] Array-based assays and bead-based assays can be used with microfluidic device. For example, the binding agent can be coupled to beads and the binding reaction between the beads and vesicle can be performed in a microfluidic device. Multiplexing can also be performed using a microfluidic device. Different compartments can comprise different binding agents for different populations of vesicles, where each population is of a different cell-of-origin specific vesicle population. In one embodiment, each population has a different biosignature. The hybridization reaction between the microsphere and vesicle can be performed in a microfluidic device and the reaction mixture can be delivered to a detection device. The detection device, such as a dual or multiple laser detection system can be part of the microfluidic system and can use a laser to identify each bead or microsphere by its color-coding, and another laser can detect the hybridization signal associated with each bead.

[0302] Various microfluidic devices and methods are described above.

[0303] Combined Isolation Methodology

[0304] One of skill will appreciate that various methods of sample treatment and isolating and concentrating circulating biomarkers such as vesicles can be combined as desired. For example, a biological sample can be treated to prevent aggregation, remove undesired particulate and/or deplete highly abundant proteins. The steps used can be chosen to optimize downstream analysis steps. Next, biomarkers such as vesicles can be isolated, e.g., by chromotography, centrifugation, density gradient, filtration, precipitation, or affinity techniques. Any number of the later steps can be combined, e.g., a sample could be subjected to one or more of chromotography, centrifugation, density gradient, filtration and precipitation in order to isolate or concentrate all or most microvesicles. In a subsequent step, affinity techniques, e.g., using binding agents to one or more target of interest, can be used to isolate or identify microvesicles carrying desired biomarker profiles. Microfluidic systems can be employed to perform some or all of these steps.

[0305] An exemplary yet non-limiting isolation scheme for isolating and analysis of microvesicles includes the following: Plasma or serum collection->highly abundant protein removal->ultrafiltration->nanomembrane concentration->flow cytometry or particle-based assay.

[0306] Using the methods disclosed herein or known in the art, circulating biomarkers such as vesicles can be isolated or concentrated by at least about 2-fold, 3-fold, 1-fold, 2-fold, 3-fold, 4-fold, 5-fold, 6-fold, 7-fold, 8-fold, 9-fold, 10-fold, 12-fold, 15-fold, 20-fold, 25-fold, 30-fold, 35-fold, 40-fold, 45-fold, 50-fold, 55-fold, 60-fold, 65-fold, 70-fold, 75-fold, 80-fold, 90-fold, 95-fold, 100-fold, 110-fold, 120-fold, 125-fold, 130-fold, 140-fold, 150-fold, 160-fold, 170-fold, 175-fold, 180-fold, 190-fold, 200-fold, 205-fold, 250-fold, 275-fold, 300-fold, 325-fold, 350-fold, 375-fold, 400-fold, 425-fold, 450-fold, 475-fold, 500-fold, 525-fold, 550-fold, 575-fold, 600-fold, 625-fold, 650-fold, 675-fold, 700-fold, 725-fold, 750-fold, 775-fold, 800-fold, 825-fold, 850-fold, 875-fold, 900-fold, 925-fold, 950-fold, 975-fold, 1000-fold, 1500-fold, 2000-fold, 2500-fold, 3000-fold, 4000-fold, 5000-fold, 6000-fold, 7000-fold, 8000-fold, 9000-fold, or at least 10,000-fold. In some embodiments, the vesicles are isolated or concentrated by at least 1 order of magnitude, 2 orders of magnitude, 3 orders of magnitude, 4 orders of magnitude, 5 orders of magnitude, 6 orders of magnitude, 7 orders of magnitude, 8 orders of magnitude, 9 orders of magnitude, or 10 orders of magnitude or more.

[0307] Once concentrated or isolated, the circulating biomarkers can be assessed, e.g., in order to characterize a phenotype as described herein. In some embodiments, the concentration or isolation steps themselves shed light on the phenotype of interest. For example, affinity methods can detect the presence or level of specific biomarkers of interest.

[0308] The various isolation and detection systems described herein can be used to isolate or detect circulating biomarkers such as vesicles that are informative for diagnosis, prognosis, disease stratification, theranosis, prediction of responder/non-responder status, disease monitoring, treatment monitoring and the like as related to such diseases and disorders. Combinations of the isolation techniques are within the scope of the invention. In a non-limiting example, a sample can be run through a chromatography column to isolate vesicles based on a property such as size of electrophoretic motility, and the vesicles can then be passed through a microfluidic device. Binding agents can be used before, during or after these steps.

[0309] The methods and compositions of the invention can be used with microvesicles isolated or detected using such methods as described herein. In various non-limiting examples: an aptamer provided by the methods of the invention can be used as a capture and/or detector agent for a biomarker such as a protein or microvesicle; a sample such as a bodily fluid can be contacted with an oligonucleotide probe library of the invention before microvesicles in the sample are isolated using one or more technique described herein (e.g., chromatography, centrifugation, flow cytometry, filtration, affinity isolation, polymer precipitation, etc); microvesicles in a sample are isolated using one or more technique described herein (e.g., chromatography, centrifugation, flow cytometry, filtration, affinity isolation, polymer precipitation, etc) before contacting the microvesicles with an aptamer or oligonucleotide probe library of the invention. Contaminants such as highly abundant proteins can be removed in whole or in part at any appropriate step in such processes. These and various other useful iterations of such techniques for assessment of microvesicles and other biomarkers are contemplated by the invention.

### Biomarkers

[0310] As described herein, the methods and compositions of the invention can be used in assays to detect the presence or level of one or more biomarker of interest. The biomarker can be any useful biomarker disclosed herein or known to those of skill in the art. In an embodiment, the biomarker comprises a protein or polypeptide. As used herein, “protein,” “polypeptide” and “peptide” are used interchangeably unless stated otherwise. The biomarker can be a nucleic acid, including DNA, RNA, and various subspecies of any thereof as disclosed herein or known in the art. The biomarker can comprise a lipid. The biomarker can comprise a carbohydrate. The biomarker can also be a complex, e.g., a complex comprising protein, nucleic acids, lipids and/or carbohydrates. In some embodiments, the biomarker comprises a microvesicle. In an embodiment, the invention provides a method wherein a pool of aptamers is used to assess the presence and/or level of a population of microvesicles of interest without knowing the precise microvesicle antigen targeted by each member of the pool. See, e.g., FIGS. 19B-C. In other cases, biomarkers associated with microvesicles are assessed according to the methods of the invention. See, e.g., FIGS. 2A-F; FIG. 19A.

[0311] A biosignature comprising more than one biomarker can comprise one type of biomarker or multiple types of biomarkers. As a non-limiting example, a biosignature can comprise multiple proteins, multiple nucleic acids, multiple lipids, multiple carbohydrates, multiple biomarker complexes, multiple microvesicles, or a combination of any thereof. For example, the biosignature may comprise one or more microvesicle, one or more protein, and one or more microRNA, wherein the one or more protein and/or one or more microRNA is optionally in association with the microvesicle as a surface antigen and/or payload, as appropriate.

[0312] In some embodiments, vesicles are detected using vesicle surface antigens. A commonly expressed vesicle surface antigen can be referred to as a “housekeeping protein,” or general vesicle biomarker. The biomarker can be CD63, CD9, CD81, CD82, CD37, CD53, Rab-5b, Annexin V or MFG-E8. Tetraspanins, a family of membrane proteins with four transmembrane domains, can be used as general vesicle biomarkers. The tetraspanins include CD151, CD53, CD37, CD82, CD81, CD9 and CD63. There have been over 30 tetraspanins identified in mammals, including the TSPAN1 (TSP-1), TSPAN2 (TSP-2), TSPAN3 (TSP-3), TSPAN4 (TSP-4, NAG-2), TSPAN5 (TSP-5), TSPAN6 (TSP-6), TSPAN7 (CD231, TALLA-1, A15), TSPAN8 (CO-029), TSPAN9 (NET-5), TSPAN10 (Oculospanin), TSPAN11 (CD151-like), TSPAN12 (NET-2), TSPAN13 (NET-6), TSPAN14, TSPAN15 (NET-7), TSPAN16 (TM4-B), TSPAN17, TSPAN18, TSPAN19, TSPAN20 (UP1b, UPK1B), TSPAN21 (UP1a, UPK1A), TSPAN22 (RDS, PRPH2), TSPAN23 (ROM1), TSPAN24 (CD151), TSPAN25 (CD53), TSPAN26 (CD37), TSPAN27 (CD82), TSPAN28 (CD81), TSPAN29 (CD9), TSPAN30 (CD63), TSPAN31 (SAS), TSPAN32 (TSSC6), TSPAN33, and TSPAN34. Other commonly observed vesicle markers include those listed in Table 3. One or more of these proteins can be useful biomarkers for the characterizing a phenotype using the subject methods and compositions.

TABLE 3
Proteins Observed in Vesicles from Multiple Cell Types

| Class | Protein |
|---|---|
| Antigen Presentation | MHC class I, MHC class II, Integrins, Alpha 4 beta 1, Alpha M beta 2, |
| | Beta 2 |
| Immunoglobulin family | ICAM1/CD54, P-selection |
| Cell-surface peptidases | Dipeptidylpeptidase IV/CD26, Aminopeptidase n/CD13 |
| Tetraspanins | CD151, CD53, CD37, CD82, CD81, CD9 and CD63 |
| Heat-shock proteins | Hsp70, Hsp84/90 |
| Cytoskeletal proteins | Actin, Actin-binding proteins, Tubulin |
| Membrane transport | Annexin I, Annexin II, Annexin IV, Annexin V, Annexin VI, |
| and fusion | RAB7/RAP1B/RADGDI |
| Signal transduction | Gi2alpha/14-3-3, CBL/LCK |
| Abundant membrane | CD63, GAPDH, CD9, CD81, ANXA2, ENO1, SDCBP, MSN, MFGE8, |
| proteins | EZR, GK, ANXA1, LAMP2, DPP4, TSG101, HSPA1A, GDI2, CLTC, |
| | LAMP1, Cd86, ANPEP, TFRC, SLC3A2, RDX, RAP1B, RAB5C, |
| | RAB5B, MYH9, ICAM1, FN1, RAB11B, PIGR, LGALS3, ITGB1, |
| | EHD1, CLIC1, ATP1A1, ARF1, RAP1A, P4HB, MUC1, KRT10, HLA- |
| | A, FLOT1, CD59, C1orf58, BASP1, TACSTD1, STOM |
| Other Transmembrane | Cadherins: CDH1, CDH2, CDH12, CDH3, Deomoglein, DSG1, DSG2, |
| Proteins | DSG3, DSG4, Desmocollin, DSC1, DSC2, DSC3, Protocadherins, |
| | PCDH1, PCDH10, PCDH11x, PCDH11y, PCDH12, FAT, FAT2, FAT4, |
| | PCDH15, PCDH17, PCDH18, PCDH19; PCDH20; PCDH7, PCDH8, |
| | PCDH9, PCDHA1, PCDHA10, PCDHA11, PCDHA12, PCDHA13, |
| | PCDHA2, PCDHA3, PCDHA4, PCDHA5, PCDHA6, PCDHA7, |
| | PCDHA8, PCDHA9, PCDHAC1, PCDHAC2, PCDHB1, PCDHB10, |
| | PCDHB11, PCDHB12, PCDHB13, PCDHB14, PCDHB15, PCDHB16, |
| | PCDHB17, PCDHB18, PCDHB2, PCDHB3, PCDHB4, PCDHB5, |
| | PCDHB6, PCDHB7, PCDHB8, PCDHB9, PCDHGA1, PCDHGA10, |
| | PCDHGA11, PCDHGA12, PCDHGA2; PCDHGA3, PCDHGA4, |
| | PCDHGA5, PCDHGA6, PCDHGA7, PCDHGA8, PCDHGA9, |
| | PCDHGB1, PCDHGB2, PCDHGB3, PCDHGB4, PCDHGB5, |
| | PCDHGB6, PCDHGB7, PCDHGC3, PCDHGC4, PCDHGC5, CDH9 |
| | (cadherin 9, type 2 (T1-cadherin)), CDH10 (cadherin 10, type 2 (T2- |
| | cadherin)), CDH5 (VE-cadherin (vascular endothelial)), CDH6 (K- |
| | cadherin (kidney)), CDH7 (cadherin 7, type 2), CDH8 (cadherin 8, type |
| | 2), CDH11 (OB-cadherin (osteoblast)), CDH13 (T-cadherin-H-cadherin |
| | (heart)), CDH15 (M-cadherin (myotubule)), CDH16 (KSP-cadherin), |
| | CDH17 (LI cadherin (liver-intestine)), CDH18 (cadherin 18, type 2), |
| | CDH19 (cadherin 19, type 2), CDH20 (cadherin 20, type 2), CDH23 |
| | (cadherin 23, (neurosensory epithelium)), CDH10, CDH11, CDH13, |
| | CDH15, CDH16, CDH17, CDH18, CDH19, CDH22, CDH23, CDH24, |
| | CDH26, CDH28, CDH4, CDH5, CDH6, CDH7, CDH8, CDH9, |
| | CELSR1, CELSR2, CELSR3, CLSTN1, CLSTN2, CLSTN3, DCHS1, |
| | DCHS2, LOC389118, PCLKC, RESDA1, RET |

[0313] Any of the types of biomarkers or specific biomarkers described herein can be used and/or assessed via the subject methods and compositions, e.g., to identify a useful biosignature. Exemplary biomarkers include without limitation those in Table 4. The markers can be detected as protein, RNA or DNA as appropriate, which can be circulating freely or in a complex with other biological molecules. As appropriate, the markers in Table 4 can also be used for capture and/or detection of vesicles for characterizing phenotypes as disclosed herein. In some cases, multiple capture and/or detectors are used to enhance the characterization. The markers can be detected as protein or as mRNA, which can be circulating freely or in a complex with other biological molecules. See, e.g., FIGS. 2D-E. The markers can be detected as vesicle surface antigens and/or vesicle payload. The “Illustrative Class” indicates indications for which the markers are known markers. Those of skill will appreciate that the markers can also be used in alternate settings in certain instances. For example, a marker which can be used to characterize one type disease may also be used to characterize another disease as appropriate. Consider a non-limiting example of a tumor marker which can be used as a biomarker for tumors from various lineages. The biomarker references in Tables 3 and 4 are those commonly used in the art. Gene aliases and descriptions can be found using a variety of online databases, including GeneCards (www.genecards.org), HUGO Gene Nomenclature (www.genenames.org), Entrez Gene (www.ncbi.nlm.nih.gov/entrez/query.fcgi?db=gene), UniProtKB/Swiss-Prot (www.uniprot.org), UniProtKB/TrEMBL (www.uniprot.org), OMIM (www.ncbi.nlm.nih.gov/entrez/query.fcgi?db=OMIM), GeneLoc (genecards.weizmann.ac.il/geneloc/), and Ensembl (www.ensembl.org). Generally, gene symbols and names below correspond to those approved by HUGO, and protein names are those recommended by UniProtKB/Swiss-Prot. Common alternatives are provided as well. In some cases, biomarkers are referred to by Ensembl reference numbers, which are of the form “ENSG” followed by a number, e.g., ENSG00000005893 which corresponds to LAMP2. In Table 4, solely for sake of brevity, “E.” is sometimes used to represent “ENSG00000”. For example, “E.005893 represents “ENSG00000005893.” Where a protein name indicates a precursor, the mature protein is also implied. Throughout the application, gene and protein symbols may be used interchangeably and the meaning can be derived from context as necessary.

TABLE 4
Illustrative Biomarkers

| Illustrative Class | Biomarkers |
|---|---|
| Drug associated | ABCC1, ABCG2, ACE2, ADA, ADH1C, ADH4, AGT, AR, AREG, ASNS, BCL2, BCRP, |
| targets and | BDCA1, beta III tubulin, BIRC5, B-RAF, BRCA1, BRCA2, CA2, caveolin, CD20, CD25, |
| prognostic markers | CD33, CD52, CDA, CDKN2A, CDKN1A, CDKN1B, CDK2, CDW52, CES2, CK 14, CK |
| | 17, CK 5/6, c-KIT, c-Met, c-Myc, COX-2, Cyclin D1, DCK, DHFR, DNMT1, DNMT3A, |
| | DNMT3B, E-Cadherin, ECGF1, EGFR, EML4-ALK fusion, EPHA2, Epiregulin, ER, |
| | ERBR2, ERCC1, ERCC3, EREG, ESR1, FLT1, folate receptor, FOLR1, FOLR2, FSHB, |
| | FSHPRH1, FSHR, FYN, GART, GNA11, GNAQ, GNRH1, GNRHR1, GSTP1, HCK, |
| | HDAC1, hENT-1, Her2/Neu, HGF, HIF1A, HIG1, HSP90, HSP90AA1, HSPCA, IGF-1R, |
| | IGFRBP, IGFRBP3, IGFRBP4, IGFRBP5, IL13RA1, IL2RA, KDR, Ki67, KIT, K-RAS, |
| | LCK, LTB, Lymphotoxin Beta Receptor, LYN, MET, MGMT, MLH1, MMR, MRP1, |
| | MS4A1, MSH2, MSH5, Myc, NFKB1, NFKB2, NFKBIA, NRAS, ODC1, OGFR, p16, p21, |
| | p27, p53, p95, PARP-1, PDGFC, PDGFR, PDGFRA, PDGFRB, PGP, PGR, PI3K, POLA, |
| | POLA1, PPARG, PPARGC1, PR, PTEN, PTGS2, PTPN12, RAF1, RARA, ROS1, RRM1, |
| | RRM2, RRM2B, RXRB, RXRG, SIK2, SPARC, SRC, SSTR1, SSTR2, SSTR3, SSTR4, |
| | SSTR5, Survivin, TK1, TLE3, TNF, TOP1, TOP2A, TOP2B, TS, TUBB3, TXN, TXNRD1, |
| | TYMS, VDR, VEGF, VEGFA, VEGFC, VHL, YES1, ZAP70 |
| Drug associated | ABL1, STK11, FGFR2, ERBB4, SMARCB1, CDKN2A, CTNNB1, FGFR1, FLT3, |
| targets and | NOTCH1, NPM1, SRC, SMAD4, FBXW7, PTEN, TP53, AKT1, ALK, APC, CDH1, C-Met, |
| prognostic markers | HRAS, IDH1, JAK2, MPL, PDGFRA, SMO, VHL, ATM, CSF1R, FGFR3, GNAS, ERBB2, |
| | HNF1A, JAK3, KDR, MLH1, PTPN11, RB1, RET, c-Kit, EGFR, PIK3CA, NRAS, GNA11, |
| | GNAQ, KRAS, BRAF |
| Drug associated | ALK, AR, BRAF, cKIT, cMET, EGFR, ER, ERCC1, GNA11, HER2, IDH1, KRAS, MGMT, |
| targets and | MGMT promoter methylation, NRAS, PDGFRA, Pgp, PIK3CA, PR, PTEN, ROS1, RRM1, |
| prognostic markers | SPARC, TLE3, TOP2A, TOPO1, TS, TUBB3, VHL |
| Drug associated | ABL1, AKT1, ALK, APC, AR, ATM, BRAF, BRAF, BRCA1, BRCA2, CDH1, cKIT, |
| targets | cMET, CSF1R, CTNNB1, EGFR, EGFR (H-score), EGFRvIII, ER, ERBB2 (HER2), |
| | ERBB4, ERCC1, FBXW7, FGFR1, FGFR2, FLT3, GNA11, GNAQ, GNAS, HER2, |
| | HNF1A, HRAS, IDH1, IDH2, JAK2, JAK3, KDR (VEGFR2), KRAS, MGMT, MGMT |
| | Promoter Methylation, microsatellite instability (MSI), MLH1, MPL, MSH2, MSH6, |
| | NOTCH1, NPM1, NRAS, PD-1, PDGFRA, PD-L1, Pgp, PIK3CA, PMS2, PR, PTEN, |
| | PTPN11, RB1, RET, ROS1, RRM1, SMAD4, SMARCB1, SMO, SPARC, STK11, TLE3, |
| | TOP2A, TOPO1, TP53, TS, TUBB3, VHL |
| Drug associated | 1p19q co-deletion, ABL1, AKT1, ALK, APC, AR, ARAF, ATM, BAP1, BRAF, BRCA1, |
| targets | BRCA2, CDH1, CHEK1, CHEK2, cKIT, cMET, CSF1R, CTNNB1, DDR2, EGFR, |
| | EGFRvIII, ER, ERBB2 (HER2), ERBB3, ERBB4, ERCC1, FBXW7, FGFR1, FGFR2, FLT3, |
| | GNA11, GNAQ, GNAS, H3K36me3, HER2, HNF1A, HRAS, IDH1, IDH2, JAK2, JAK3, |
| | KDR (VEGFR2), KRAS, MDMT, MGMT, MGMT Methylation, Microsatellite instability, |
| | MLH1, MPL, MSH2, MSH6, NF1, NOTCH1, NPM1, NRAS, NY-ESO-1, PD-1, PDGFRA, |
| | PD-L1, Pgp, PIK3CA, PMS2, PR, PTEN, PTPN11, RAF1, RB1, RET, ROS1, ROS1, RRM1, |
| | SMAD4, SMARCB1, SMO, SPARC, STK11, TLE3, TOP2A, TOPO1, TP53, TRKA, TS, |
| | TUBB3, VHL, WT1 |
| Drug associated | ABL1, AKT1, ALK, APC, AR, ATM, BRAF, BRAF, BRCA1, BRCA2, CDH1, cKIT, |
| targets | cMET, CSF1R, CTNNB1, EGFR, EGFR (H-score), EGFRvIII, ER, ERBB2 (HER2), |
| | ERBB4, ERCC1, FBXW7, FGFR1, FGFR2, FLT3, GNA11, GNAQ, GNAS, HER2, |
| | HNF1A, HRAS, IDH1, IDH2, JAK2, JAK3, KDR (VEGFR2), KRAS, MGMT, MGMT |
| | Promoter Methylation, microsatellite instability (MSI), MLH1, MPL, MSH2, MSH6, |
| | NOTCH1, NPM1, NRAS, PD-1, PDGFRA, PD-L1, Pgp, PIK3CA, PMS2, PR, PTEN, |
| | PTPN11, RB1, RET, ROS1, RRM1, SMAD4, SMARCB1, SMO, SPARC, STK11, TLE3, |
| | TOP2A, TOPO1, TP53, TS, TUBB3, VHL |
| Drug associated | 1p19q, ALK, ALK (2p23), Androgen Receptor, BRCA, cMET, EGFR, EGFR, EGFRvIII, |
| targets | ER, ERCC1, Her2, Her2/Neu, MGMT, MGMT Promoter Methylation, microsatellite |
| | instability (MSI), MLH1, MSH2, MSH6, PD-1, PD-L1, PMS2, PR, PTEN, ROS1, RRM1, |
| | TLE3, TOP2A, TOP2A, TOPO1, TS, TUBB3 |
| Drug associated | TOP2A, Chromosome 17 alteration, PBRM1 (PB1/BAF180), BAP1, SETD2 (ANTI- |
| targets | HISTONE H3), MDM2, Chromosome 12 alteration, ALK, CTLA4, CD3, NY-ESO-1, |
| | MAGE-A, TP, EGFR |
| 5-aminosalicyclic | μ-protocadherin, KLF4, CEBPα |
| acid (5-ASA) | |
| efficacy | |
| Cancer treatment | AR, AREG (Amphiregulin), BRAF, BRCA1, cKIT, cMET, EGFR, EGFR w/T790M, EML4- |
| associated markers | ALK, ER, ERBB3, ERBB4, ERCC1, EREG, GNA11, GNAQ, hENT-1, Her2, Her2 Exon 20 |
| | insert, IGF1R, Ki67, KRAS, MGMT, MGMT methylation, MSH2, MSI, NRAS, PGP |
| | (MDR1), PIK3CA, PR, PTEN, ROS1, ROS1 translocation, RRM1, SPARC, TLE3, TOPO1, |
| | TOPO2A, TS, TUBB3, VEGFR2 |
| Cancer treatment | AR, AREG, BRAF, BRCA1, cKIT, cMET, EGFR, EGFR w/T790M, EML4-ALK, ER, |
| associated markers | ERBB3, ERBB4, ERCC1, EREG, GNA11, GNAQ, Her2, Her2 Exon 20 insert, IGFR1, Ki67, |
| | KRAS, MGMT-Me, MSH2, MSI, NRAS, PGP (MDR-1), PIK3CA, PR, PTEN, ROS1 |
| | translocation, RRM1, SPARC, TLE3, TOPO1, TOPO2A, TS, TUBB3, VEGFR2 |
| Colon cancer | AREG, BRAF, EGFR, EML4-ALK, ERCC1, EREG, KRAS, MSI, NRAS, PIK3CA, PTEN, |
| treatment | TS, VEGFR2 |
| associated markers | |
| Colon cancer | AREG, BRAF, EGFR, EML4-ALK, ERCC1, EREG, KRAS, MSI, NRAS, PIK3CA, PTEN, |
| treatment | TS, VEGFR2 |
| associated markers | |
| Melanoma | BRAF, cKIT, ERBB3, ERBB4, ERCC1, GNA11, GNAQ, MGMT, MGMT methylation, |
| treatment | NRAS, PIK3CA, TUBB3, VEGFR2 |
| associated markers | |
| Melanoma | BRAF, cKIT, ERBB3, ERBB4, ERCC1, GNA11, GNAQ, MGMT-Me, NRAS, PIK3CA, |
| treatment | TUBB3, VEGFR2 |
| associated markers | |
| Ovarian cancer | BRCA1, cMET, EML4-ALK, ER, ERBB3, ERCC1, hENT-1, HER2, IGF1R, PGP(MDR1), |
| treatment | PIK3CA, PR, PTEN, RRM1, TLE3, TOPO1, TOPO2A, TS |
| associated markers | |
| Ovarian cancer | BRCA1, cMET, EML4-ALK (translocation), ER, ERBB3, ERCC1, HER2, PIK3CA, PR, |
| treatment | PTEN, RRM1, TLE3, TS |
| associated markers | |
| Breast cancer | BRAF, BRCA1, EGFR, EGFR T790M, EML4-ALK, ER, ERBB3, ERCC1, HER2, Ki67, |
| treatment | PGP (MDR1), PIK3CA, PR, PTEN, ROS1, ROS1 translocation, RRM1, TLE3, TOPO1, |
| associated markers | TOPO2A, TS |
| Breast cancer | BRAF, BRCA1, EGFR w/T790M, EML4-ALK, ER, ERBB3, ERCC1, HER2, Ki67, KRAS, |
| treatment | PIK3CA, PR, PTEN, ROS1 translocation, RRM1, TLE3, TOPO1, TOPO2A, TS |
| associated markers | |
| NSCLC cancer | BRAF, BRCA1, cMET, EGFR, EGFR w/T790M, EML4-ALK, ERCC1, Her2 Exon 20 |
| treatment | insert, KRAS, MSH2, PIK3CA, PTEN, ROS1 (trans), RRM1, TLE3, TS, VEGFR2 |
| associated markers | |
| NSCLC cancer | BRAF, cMET, EGFR, EGFR w/T790M, EML4-ALK, ERCC1, Her2 Exon 20 insert, KRAS, |
| treatment | MSH2, PIK3CA, PTEN, ROS1 translocation, RRM1, TLE3, TS |
| associated markers | |
| Mutated in cancers | AKT1, ALK, APC, ATM, BRAF, CDH1, CDKN2A, c-Kit, C-Met, CSF1R, CTNNB1, |
| | EGFR, ERBB2, ERBB4, FBXW7, FGFR1, FGFR2, FGFR3, FLT3, GNA11, GNAQ, GNAS, |
| | HNF1A, HRAS, IDH1, JAK2, JAK3, KDR, KRAS, MLH1, MPL, NOTCH1, NPM1, NRAS, |
| | PDGFRA, PIK3CA, PTEN, PTPN11, RB1, RET, SMAD4, SMARCB1, SMO, SRC, STK11, |
| | TP53, VHL |
| Mutated in cancers | ALK, BRAF, BRCA1, BRCA2, EGFR, ERRB2, GNA11, GNAQ, IDH1, IDH2, KIT, KRAS, |
| | MET, NRAS, PDGFRA, PIK3CA, PTEN, RET, SRC, TP53 |
| Mutated in cancers | AKT1, HRAS, GNAS, MEK1, MEK2, ERK1, ERK2, ERBB3, CDKN2A, PDGFRB, IFG1R, |
| | FGFR1, FGFR2, FGFR3, ERBB4, SMO, DDR2, GRB1, PTCH, SHH, PD1, UGT1A1, BIM, |
| | ESR1, MLL, AR, CDK4, SMAD4 |
| Mutated in cancers | ABL, APC, ATM, CDH1, CSFR1, CTNNB1, FBXW7, FLT3, HNF1A, JAK2, JAK3, KDR, |
| | MLH1, MPL, NOTCH1, NPM1, PTPN11, RB1, SMARCB1, STK11, VHL |
| Mutated in cancers | ABL1, AKT1, AKT2, AKT3, ALK, APC, AR, ARAF, ARFRP1, ARID1A, ARID2, ASXL1, |
| | ATM, ATR, ATRX, AURKA, AURKB, AXL, BAP1, BARD1, BCL2, BCL2L2, BCL6, |
| | BCOR, BCORL1, BLM, BRAF, BRCA1, BRCA2, BRIP1, BTK, CARD11, CBFB, CBL, |
| | CCND1, CCND2, CCND3, CCNE1, CD79A, CD79B, CDC73, CDH1, CDK12, CDK4, |
| | CDK6, CDK8, CDKN1B, CDKN2A, CDKN2B, CDKN2C, CEBPA, CHEK1, CHEK2, CIC, |
| | CREBBP, CRKL, CRLF2, CSF1R, CTCF, CTNNA1, CTNNB1, DAXX, DDR2, DNMT3A, |
| | DOT1L, EGFR, EMSY (C11orf30), EP300, EPHA3, EPHA5, EPHB1, ERBB2, ERBB3, |
| | ERBB4, ERG, ESR1, EZH2, FAM123B (WTX), FAM46C, FANCA, FANCC, FANCD2, |
| | FANCE, FANCF, FANCG, FANCL, FBXW7, FGF10, FGF14, FGF19, FGF23, FGF3, |
| | FGF4, FGF6, FGFR1, FGFR2, FGFR3, FGFR4, FLT1, FLT3, FLT4, FOXL2, GATA1, |
| | GATA2, GATA3, GID4 (C17orf39), GNA11, GNA13, GNAQ, GNAS, GPR124, GRIN2A, |
| | GSK3B, HGF, HRAS, IDH1, IDH2, IGF1R, IKBKE, IKZF1, IL7R, INHBA, IRF4, IRS2, |
| | JAK1, JAK2, JAK3, JUN, KAT6A (MYST3), KDM5A, KDM5C, KDM6A, KDR, KEAP1, |
| | KIT, KLHL6, KRAS, LRP1B, MAP2K1, MAP2K2, MAP2K4, MAP3K1, MCL1, MDM2, |
| | MDM4, MED12, MEF2B, MEN1, MET, MITF, MLH1, MLL, MLL2, MPL, MRE11A, |
| | MSH2, MSH6, MTOR, MUTYH, MYC, MYCL1, MYCN, MYD88, NF1, NF2, NFE2L2, |
| | NFKBIA, NKX2-1, NOTCH1, NOTCH2, NPM1, NRAS, NTRK1, NTRK2, NTRK3, |
| | NUP93, PAK3, PALB2, PAX5, PBRM1, PDGFRA, PDGFRB, PDK1, PIK3CA, PIK3CG, |
| | PIK3R1, PIK3R2, PPP2R1A, PRDM1, PRKAR1A, PRKDC, PTCH1, PTEN, PTPN11, |
| | RAD50, RAD51, RAF1, RARA, RB1, RET, RICTOR, RNF43, RPTOR, RUNX1, SETD2, |
| | SF3B1, SMAD2, SMAD4, SMARCA4, SMARCB1, SMO, SOCS1, SOX10, SOX2, SPEN, |
| | SPOP, SRC, STAG2, STAT4, STK11, SUFU, TET2, TGFBR2, TNFAIP3, TNFRSF14, |
| | TOP1, TP53, TSC1, TSC2, TSHR, VHL, WISP3, WT1, XPO1, ZNF217, ZNF703 |
| Gene | ALK, BCR, BCL2, BRAF, EGFR, ETV1, ETV4, ETV5, ETV6, EWSR1, MLL, MYC, |
| rearrangement in | NTRK1, PDGFRA, RAF1, RARA, RET, ROS1, TMPRSS2 |
| cancer | |
| Cancer Related | ABL1, ACE2, ADA, ADH1C, ADH4, AGT, AKT1, AKT2, AKT3, ALK, APC, AR, ARAF, |
| | AREG, ARFRP1, ARID1A, ARID2, ASNS, ASXL1, ATM, ATR, ATRX, AURKA, |
| | AURKB, AXL, BAP1, BARD1, BCL2, BCL2L2, BCL6, BCOR, BCORL1, BCR, BIRC5 |
| | (survivin), BLM, BRAF, BRCA1, BRCA2, BRIP1, BTK, CA2, CARD11, CAV, CBFB, |
| | CBL, CCND1, CCND2, CCND3, CCNE1, CD33, CD52 (CDW52), CD79A, CD79B, |
| | CDC73, CDH1, CDK12, CDK2, CDK4, CDK6, CDK8, CDKN1B, CDKN2A, CDKN2B, |
| | CDKN2C, CEBPA, CES2, CHEK1, CHEK2, CIC, CREBBP, CRKL, CRLF2, CSF1R, |
| | CTCF, CTNNA1, CTNNB1, DAXX, DCK, DDR2, DHFR, DNMT1, DNMT3A, DNMT3B, |
| | DOT1L, EGFR, EMSY (C11orf30), EP300, EPHA2, EPHA3, EPHA5, EPHB1, ERBB2, |
| | ERBB3, ERBB4, ERBR2 (typo?), ERCC3, EREG, ERG, ESR1, ETV1, ETV4, ETV5, ETV6, |
| | EWSR1, EZH2, FAM123B (WTX), FAM46C, FANCA, FANCC, FANCD2, FANCE, |
| | FANCF, FANCG, FANCL, FBXW7, FGF10, FGF14, FGF19, FGF23, FGF3, FGF4, FGF6, |
| | FGFR1, FGFR2, FGFR3, FGFR4, FLT1, FLT3, FLT4, FOLR1, FOLR2, FOXL2, FSHB, |
| | FSHPRH1, FSHR, GART, GATA1, GATA2, GATA3, GID4 (C17orf39), GNA11, GNA13, |
| | GNAQ, GNAS, GNRH1, GNRHR1, GPR124, GRIN2A, GSK3B, GSTP1, HDAC1, HGF, |
| | HIG1, HNF1A, HRAS, HSPCA (HSP90), IDH1, IDH2, IGF1R, IKBKE, IKZF1, IL13RA1, |
| | IL2, IL2RA (CD25), IL7R, INHBA, IRF4, IRS2, JAK1, JAK2, JAK3, JUN, KAT6A |
| | (MYST3), KDM5A, KDM5C, KDM6A, KDR (VEGFR2), KEAP1, KIT, KLHL6, KRAS, |
| | LCK, LRP1B, LTB, LTBR, MAP2K1, MAP2K2, MAP2K4, MAP3K1, MAPK, MCL1, |
| | MDM2, MDM4, MED12, MEF2B, MEN1, MET, MGMT, MITF, MLH1, MLL, MLL2, |
| | MPL, MRE11A, MS4A1 (CD20), MSH2, MSH6, MTAP, MTOR, MUTYH, MYC, MYCL1, |
| | MYCN, MYD88, NF1, NF2, NFE2L2, NFKB1, NFKB2, NFKBIA, NGF, NKX2-1, |
| | NOTCH1, NOTCH2, NPM1, NRAS, NTRK1, NTRK2, NTRK3, NUP93, ODC1, OGFR, |
| | PAK3, PALB2, PAX5, PBRM1, PDGFC, PDGFRA, PDGFRB, PDK1, PGP, PGR (PR), |
| | PIK3CA, PIK3CG, PIK3R1, PIK3R2, POLA, PPARG, PPARGC1, PPP2R1A, PRDM1, |
| | PRKAR1A, PRKDC, PTCH1, PTEN, PTPN11, RAD50, RAD51, RAF1, RARA, RB1, RET, |
| | RICTOR, RNF43, ROS1, RPTOR, RRM1, RRM2, RRM2B, RUNX1, RXR, RXRB, RXRG, |
| | SETD2, SF3B1, SMAD2, SMAD4, SMARCA4, SMARCB1, SMO, SOCS1, SOX10, SOX2, |
| | SPARC, SPEN, SPOP, SRC, SST, SSTR1, SSTR2, SSTR3, SSTR4, SSTR5, STAG2, |
| | STAT4, STK11, SUFU, TET2, TGFBR2, TK1, TLE3, TMPRSS2, TNF, TNFAIP3, |
| | TNFRSF14, TOP1, TOP2, TOP2A, TOP2B, TP53, TS, TSC1, TSC2, TSHR, TUBB3, TXN, |
| | TYMP, VDR, VEGF (VEGFA), VEGFC, VHL, WISP3, WT1, XDH, XPO1, YES1, ZAP70, |
| | ZNF217, ZNF703 |
| Cancer Related | 5T4, ABI1, ABL1, ABL2, ACKR3, ACSL3, ACSL6, ACVR1B, ACVR2A, AFF1, AFF3, |
| | AFF4, AKAP9, AKT1, AKT2, AKT3, ALDH2, ALK, AMER1, ANG1/ANGPT1/TM7SF2, |
| | ANG2/ANGPT2/VPS51, APC, AR, ARAF, ARFRP1, ARHGAP26, ARHGEF12, ARID1A, |
| | ARID1B, ARID2, ARNT, ASPSCR1, ASXL1, ATF1, ATIC, ATM, ATP1A1, ATP2B3, |
| | ATR, ATRX, AURKA, AURKB, AXIN1, AXL, BAP1, BARD1, BBC3, BCL10, BCL11A, |
| | BCL11B, BCL2, BCL2L1, BCL2L11, BCL2L2, BCL3, BCL6, BCL7A, BCL9, BCOR, |
| | BCORL1, BCR, BIRC3, BLM, BMPR1A, BRAF, BRCA1, BRCA2, BRD3, BRD4, BRIP1, |
| | BTG1, BTK, BUB1B, c-KIT, C11orf30, c15orf21, C15orf65, C2orf44, CA6, CACNA1D, |
| | CALR, CAMTA1, CANT1, CARD11, CARS, CASC5, CASP8, CBFA2T3, CBFB, CBL, |
| | CBLB, CBLC, CCDC6, CCNB1IP1, CCND1, CCND2, CCND3, CCNE1, CD110, CD123, |
| | CD137, CD19, CD20, CD274, CD27L, CD38, CD4, CD74, CD79A, CD79B, CDC73, |
| | CDH1, CDH11, CDK12, CDK4, CDK6, CDK7, CDK8, CDK9, CDKN1A, CDKN1B, |
| | CDKN2A, CDKN2B, CDKN2C, CDX2, CEBPA, CHCHD7, CHD2, CHD4, CHEK1, |
| | CHEK2, CHIC2, Chk1, CHN1, CIC, CIITA, CLP1, CLTC, CLTCL1, CNBP, CNOT3, |
| | CNTRL, COL1A1, COPB1, CoREST, COX6C, CRAF, CREB1, CREB3L1, CREB3L2, |
| | CREBBP, CRKL, CRLF2, CRTC1, CRTC3, CSF1R, CSF3R, CTCF, CTLA4, CTNNA1, |
| | CTNNB1, CUL3, CXCR4, CYLD, CYP17A1, CYP2D6, DAXX, DDB2, DDIT3, DDR1, |
| | DDR2, DDX10, DDX5, DDX6, DEK, DICER1, DLL-4, DNAPK, DNM2, DNMT3A, |
| | DOT1L, EBF1, ECT2L, EGFR, EIF4A2, ELF4, ELK4, ELL, ELN, EML4, EP300, EPHA3, |
| | EPHA5, EPHA7, EPHA8, EPHB1, EPHB2, EPS15, ERBB2, ERBB3, ERBB4, ERC1, |
| | ERCC1, ERCC2, ERCC3, ERCC4, ERCC5, ERG, ERRFI1, ESR1, ETBR, ETV1, ETV4, |
| | ETV5, ETV6, EWSR1, EXT1, EXT2, EZH2, EZR, FAK, FAM46C, FANCA, FANCC, |
| | FANCD2, FANCE, FANCF, FANCG, FANCL, FAS, FAT1, FBXO11, FBXW7, FCRL4, |
| | FEV, FGF10, FGF14, FGF19, FGF2, FGF23, FGF3, FGF4, FGF6, FGFR1, FGFR1OP, |
| | FGFR2, FGFR3, FGFR4, FH, FHIT, FIP1L1, FKBP12, FLCN, FLI1, FLT1, FLT3, FLT4, |
| | FNBP1, FOXA1, FOXL2, FOXO1, FOXO3, FOXO4, FOXP1, FRS2, FSTL3, FUBP1, FUS, |
| | GABRA6, GAS7, GATA1, GATA2, GATA3, GATA4, GATA6, GID4, GITR, GLI1, GMPS, |
| | GNA11, GNA13, GNAQ, GNAS, GNRH1, GOLGA5, GOPC, GPC3, GPHN, GPR124, |
| | GRIN2A, GRM3, GSK3B, GUCY2C, H3F3A, H3F3B, HCK, HERPUD1, HEY1, HGF, |
| | HIP1, HIST1H3B, HIST1H4I, HLF, HMGA1, HMGA2, HMT, HNF1A, HNRNPA2B1, |
| | HOOK3, HOXA11, HOXA13, HOXA9, HOXC11, HOXC13, HOXD11, HOXD13, HRAS, |
| | HSD3B1, HSP90AA1, HSP90AB1, IAP, IDH1, IDH2, IGF1R, IGF2, IKBKE, IKZF1, IL2, |
| | IL21R, IL6, IL6ST, IL7R, INHBA, INPP4B, IRF2, IRF4, IRS2, ITGAV, ITGB1, ITK, JAK1, |
| | JAK2, JAK3, JAZF1, JUN, KAT6A, KAT6B, KCNJ5, KDM5A, KDM5C, KDM6A, KDR, |
| | KDSR, KEAP1, KEL, KIAA1549, KIF5B, KIR3DL1, KLF4, KLHL6, KLK2, KMT2A, |
| | KMT2C, KMT2D, KRAS, KTN1, LASP1, LCK, LCP1, LGALS3, LGR5, LHFP, LIFR, |
| | LMO1, LMO2, LOXL2, LPP, LRIG3, LRP1B, LSD1, LYL1, LYN, LZTR1, MAF, MAFB, |
| | MAGI2, MALT1, MAML2, MAP2K1, MAP2K2, MAP2K4, MAP3K1, MAPK1, MAPK11, |
| | MAX, MCL1, MDM2, MDM4, MDS2, MECOM, MED12, MEF2B, MEK1, MEK2, MEN1, |
| | MET, MITF, MKL1, MLF1, MLH1, MLLT1, MLLT10, MLLT11, MLLT3, MLLT4, |
| | MLLT6, MMP9, MN1, MNX1, MPL, MPS1, MRE11A, MS4A1, MSH2, MSH6, MSI2, |
| | MSN, MST1R, MTCP1, MTOR, MUC1, MUC16, MUTYH, MYB, MYC, MYCL, MYCN, |
| | MYD88, MYH11, MYH9, NACA, NAE1, NBN, NCKIPSD, NCOA1, NCOA2, NCOA4, |
| | NDRG1, NF1, NF2, NFE2L2, NFIB, NFKB2, NFKBIA, NIN, NKX2-1, NONO, NOTCH1, |
| | NOTCH2, NOTCH3, NPM1, NR4A3, NRAS, NSD1, NT5C2, NTRK1, NTRK2, NTRK3, |
| | NUMA1, NUP214, NUP93, NUP98, NUTM1, NUTM2B, OLIG2, OMD, P2RY8, |
| | PAFAH1B2, PAK3, PALB2, PARK2, PARP1, PATZ1, PAX3, PAX5, PAX7, PAX8, |
| | PBRM1, PBX1, PCM1, PCSK7, PDCD1, PDCD1LG2, PDE4DIP, PDGFB, PDGFRA, |
| | PDGFRB, PDK1, PER1, PHF6, PHOX2B, PICALM, PIK3C2B, PIK3CA, PIK3CB, |
| | PIK3CD, PIK3CG, PIK3R1, PIK3R2, PIM1, PKC, PLAG1, PLCG2, PML, PMS1, PMS2, |
| | POLD1, POLE, POT1, POU2AF1, POU5F1, PPARG, PPP2R1A, PRCC, PRDM1, PRDM16, |
| | PREX2, PRF1, PRKAR1A, PRKCI, PRKDC, PRLR, PRRX1, PRSS8, PSIP1, PTCH1, |
| | PTEN, PTK2, PTPN11, PTPRC, PTPRD, QKI, RABEP1, RAC1, RAD21, RAD50, RAD51, |
| | RAD51B, RAF1, RALGDS, RANBP17, RANBP2, RANKL, RAP1GDS1, RARA, RB1, |
| | RBM10, RBM15, RECQL4, REL, RET, RHOH, RICTOR, RMI2, RNF213, RNF43, ROS1, |
| | RPL10, RPL20, RPL5, RPN1, RPS6KB1, RPTOR, RUNX1, RUNx1T1, SBDS, SDC4, |
| | SDHA, SDHAF2, SDHB, SDHC, SDHD, SEPT5, SEPT6, SEPT9, SET, SETBP1, SETD2, |
| | SF3B1, SFPQ, SH2B3, SH3GL1, SLAMF7, SLC34A2, SLC45A3, SLIT2, SMAD2, |
| | SMAD3, SMAD4, SMARCA4, SMARCB1, SMARCE1, SMO, SNCAIP, SNX29, SOCS1, |
| | SOX10, SOX2, SOX9, SPECC1, SPEN, SPOP, SPTA1, SRC, SRGAP3, SRSF2, SRSF3, |
| | SS18, SS18L1, SSX1, SSX2, SSX4, STAG2, STAT3, STAT4, STAT5B, STEAP1, STIL, |
| | STK11, SUFU, SUZ12, SYK, TAF1, TAF15, TAL1, TAL2, TBL1XR1, TBX3, TCEA1, |
| | TCF12, TCF3, TCF7L2, TCL1A, TERC, TERT, TET1, TET2, TFE3, TFEB, TFG, TFPT, |
| | TFRC, TGFB1, TGFBR2, THRAP3, TIE2, TLX1, TLX3, TMPRSS2, TNFAIP3, |
| | TNFRSF14, TNFRSF17, TOP1, TOP2A, TP53, TPM3, TPM4, TPR, TRAF7, TRIM26, |
| | TRIM27, TRIM33, TRIP11, TRRAP, TSC1, TSC2, TSHR, TTL, U2AF1, UBA1, UBR5, |
| | USP6, VEGFA, VEGFB, VEGFR, VHL, VTI1A, WAS, WEE1, WHSC1, WHSC1L1, WIF1, |
| | WISP3, WNT11, WNT2B, WNT3, WNT3A, WNT4, WNT5A, WNT6, WNT7B, WRN, |
| | WT1, WWTR1, XPA, XPC, XPO1, YWHAE, ZAK, ZBTB16, ZBTB2, ZMYM2, ZNF217, |
| | ZNF331, ZNF384, ZNF521, ZNF703, ZRSR2 |
| Cancer Related | ABL2, ACSL3, ACSL6, AFF1, AFF3, AFF4, AKAP9, AKT3, ALDH2, APC, ARFRP1, |
| | ARHGAP26, ARHGEF12, ARID2, ARNT, ASPSCR1, ASXL1, ATF1, ATIC, ATM, |
| | ATP1A1, ATR, AURKA, AXIN1, AXL, BAP1, BARD1, BCL10, BCL11A, BCL2L11, |
| | BCL3, BCL6, BCL7A, BCL9, BCR, BIRC3, BLM, BMPR1A, BRAF, BRCA1, BRCA2, |
| | BRIP1, BUB1B, C11orf30, C2orf44, CACNA1D, CALR, CAMTA1, CANT1, CARD11, |
| | CARS, CASC5, CASP8, CBFA2T3, CBFB, CBL, CBLB, CCDC6, CCNB1IP1, CCND2, |
| | CD274, CD74, CD79A, CDC73, CDH11, CDKN1B, CDX2, CHEK1, CHEK2, CHIC2, |
| | CHN1, CIC, CIITA, CLP1, CLTC, CLTCL1, CNBP, CNTRL, COPB1, CREB1, CREB3L1, |
| | CREB3L2, CRTC1, CRTC3, CSF1R, CSF3R, CTCF, CTLA4, CTNNA1, CTNNB1, CYLD, |
| | CYP2D6, DAXX, DDR2, DDX10, DDX5, DDX6, DEK, DICER1, DOT1L, EBF1, ECT2L, |
| | ELK4, ELL, EML4, EPHA3, EPHA5, EPHB1, EPS15, ERBB3, ERBB4, ERC1, ERCC2, |
| | ERCC3, ERCC4, ERCC5, ERG, ESR1, ETV1, ETV5, ETV6, EWSR1, EXT1, EXT2, EZR, |
| | FANCA, FANCC, FANCD2, FANCE, FANCG, FANCL, FAS, FBXO11, FBXW7, FCRL4, |
| | FGF14, FGF19, FGF23, FGF6, FGFR1OP, FGFR4, FH, FHIT, FIP1L1, FLCN, FLI1, FLT1, |
| | FLT3, FLT4, FNBP1, FOXA1, FOXO1, FOXP1, FUBP1, FUS, GAS7, GID4, GMPS, |
| | GNA13, GNAQ, GNAS, GOLGA5, GOPC, GPHN, GPR124, GRIN2A, GSK3B, H3F3A, |
| | H3F3B, HERPUD1, HGF, HIP1, HMGA1, HMGA2, HNRNPA2B1, HOOK3, HSP90AA1, |
| | HSP90AB1, IDH1, IDH2, IGF1R, IKZF1, IL2, IL21R, IL6ST, IL7R, IRF4, ITK, JAK1, |
| | JAK2, JAK3, JAZF1, KDM5A, KEAP1, KIAA1549, KIF5B, KIT, KLHL6, KMT2A, |
| | KMT2C, KMT2D, KRAS, KTN1, LCK, LCP1, LGR5, LHFP, LIFR, LPP, LRIG3, LRP1B, |
| | LYL1, MAF, MALT1, MAML2, MAP2K2, MAP2K4, MAP3K1, MDM4, MDS2, MEF2B, |
| | MEN1, MITF, MLF1, MLH1, MLLT1, MLLT10, MLLT3, MLLT4, MLLT6, MNX1, |
| | MRE11A, MSH2, MSH6, MSI2, MTOR, MYB, MYCN, MYD88, MYH11, MYH9, NACA, |
| | NCKIPSD, NCOA1, NCOA2, NCOA4, NF1, NFE2L2, NFIB, NFKB2, NIN, NOTCH2, |
| | NPM1, NR4A3, NSD1, NT5C2, NTRK2, NTRK3, NUP214, NUP93, NUP98, NUTM1, |
| | PALB2, PAX3, PAX5, PAX7, PBRM1, PBX1, PCM1, PCSK7, PDCD1, PDCD1LG2, |
| | PDGFB, PDGFRA, PDGFRB, PDK1, PER1, PICALM, PIK3CA, PIK3R1, PIK3R2, PIM1, |
| | PML, PMS2, POLE, POT1, POU2AF1, PPARG, PRCC, PRDM1, PRDM16, PRKAR1A, |
| | PRRX1, PSIP1, PTCH1, PTEN, PTPN11, PTPRC, RABEP1, RAC1, RAD50, RAD51, |
| | RAD51B, RAF1, RALGDS, RANBP17, RAP1GDS1, RARA, RBM15, REL, RET, RMI2, |
| | RNF43, RPL20, RPL5, RPN1, RPTOR, RUNX1, RUNX1T1, SBDS, SDC4, SDHAF2, |
| | SDHB, SDHC, SDHD, 8-Sep, SET, SETBP1, SETD2, SF3B1, SH2B3, SH3GL1, SLC34A2, |
| | SMAD2, SMAD4, SMARCB1, SMARCE1, SMO, SNX29, SOX10, SPECC1, SPEN, |
| | SRGAP3, SRSF2, SRSF3, SS18, SS18L1, STAT3, STAT4, STAT5B, STIL, STK11, SUFU, |
| | SUZ12, SYK, TAF15, TCF12, TCF3, TCF7L2, TET1, TET2, TFEB, TFG, TFRC, TGFBR2, |
| | TLX1, TNFAIP3, TNFRSF14, TNFRSF17, TP53, TPM3, TPM4, TPR, TRAF7, TRIM26, |
| | TRIM27, TRIM33, TRIP11, TRRAP, TSC1, TSC2, TSHR, TTL, U2AF1, USP6, VEGFA, |
| | VEGFB, VTI1A, WHSC1, WHSC1L1, WIF1, WISP3, WRN, WWTR1, XPA, XPC, XPO1, |
| | YWHAE, ZMYM2, ZNF217, ZNF331, ZNF384, ZNF521, ZNF703 |
| Gene fusions and | AKT3, ALK, ARHGAP26, AXL, BRAF, BRD3/4, EGFR, ERG, ESR1, ETV1/4/5/6, |
| mutations in cancer | EWSR1, FGFR1, FGFR2, FGFR3, FGR, INSR, MAML2, MAST1/2, MET, MSMB, MUSK, |
| | MYB, NOTCH1/2, NRG1, NTRK1/2/3, NUMBL, NUTM1, PDGFRA/B, PIK3CA, PKN1, |
| | PPARG, PRKCA/B, RAF1, RELA, RET, ROS1, RSPO2/3, TERT, TFE3, TFEB, THADA, |
| | TMPRSS2 |
| Gene fusions and | ABL1 fusion to (ETV6, NUP214, RCSD1, RANBP2, SNX2, or ZMIZ1); ABL2 fusion to |
| mutations in cancer | (PAG1 or RCSD1); CSF1R fusion to (SSBP2); PDGFRB fusion to (EBF1, SSBP2, |
| | TNIP1 or ZEB2); CRLF2 fusion to (P2RY8); JAK2 fusion to (ATF7IP, BCR, ETV6, |
| | PAX5, PPFIBP1, SSBP2, STRN3, TERF2, or TPR); EPOR fusion to (IGH or IGK); |
| | IL2RB fusion to (MYH9); NTRK3 fusion to (ETV6); PTK2B fusion to (KDM6A or |
| | STAG2); TSLP fusion to (IQGAP2); TYK2 fusion to (MYB) |
| Cytohesions | cytohesin-1 (CYTH1), cytohesin-2 (CYTH2; ARNO), cytohesin-3 (CYTH3; Grp1; ARNO3), |
| | cytohesin-4 (CYTH4) |
| Cancer/Angio | Erb 2, Erb 3, Erb 4, UNC93a, B7H3, MUC1, MUC2, MUC16, MUC17, 5T4, RAGE, VEGFA, |
| | VEGFR2, FLT1, DLL4, Epcam |
| Tissue (Breast) | BIG H3, GCDFP-15, PR(B), GPR 30, CYFRA 21, BRCA 1, BRCA 2, ESR 1, ESR2 |
| Tissue (Prostate) | PSMA, PCSA, PSCA, PSA, TMPRSS2 |
| Inflammation/Immune | MFG-E8, IFNAR, CD40, CD80, MICB, HLA-DRb, IL-17-Ra |
| Common vesicle | HSPA8, CD63, Actb, GAPDH, CD9, CD81, ANXA2, HSP90AA1, ENO1, YWHAZ, |
| markers | PDCD6IP, CFL1, SDCBP, PKN2, MSN, MFGE8, EZR, YWHAG, PGK1, EEF1A1, PPIA, |
| | GLC1F, GK, ANXA6, ANXA1, ALDOA, ACTG1, TPI1, LAMP2, HSP90AB1, DPP4, |
| | YWHAB, TSG101, PFN1, LDHB, HSPA1B, HSPA1A, GSTP1, GNAI2, GDI2, CLTC, |
| | ANXA5, YWHAQ, TUBA1A, THBS1, PRDX1, LDHA, LAMP1, CLU, CD86 |
| Common vesicle | CD63, GAPDH, CD9, CD81, ANXA2, ENO1, SDCBP, MSN, MFGE8, EZR, GK, ANXA1, |
| membrane markers | LAMP2, DPP4, TSG101, HSPA1A, GDI2, CLTC, LAMP1, CD86, ANPEP, TFRC, |
| | SLC3A2, RDX, RAP1B, RAB5C, RAB5B, MYH9, ICAM1, FN1, RAB11B, PIGR, |
| | LGALS3, ITGB1, EHD1, CLIC1, ATP1A1, ARF1, RAP1A, P4HB, MUC1, KRT10, HLA- |
| | A, FLOT1, CD59, C1orf58, BASP1, TACSTD1, STOM |
| Common vesicle | MHC class I, MHC class II, Integrins, Alpha 4 beta 1, Alpha M beta 2, Beta 2, |
| markers | ICAM1/CD54, P-selection, Dipeptidylpeptidase IV/CD26, Aminopeptidase n/CD13, CD151, |
| | CD53, CD37, CD82, CD81, CD9, CD63, Hsp70, Hsp84/90 |
| | Actin, Actin-binding proteins, Tubulin, Annexin I, Annexin II, Annexin IV, Annexin V, |
| | Annexin VI, RAB7/RAP1B/RADGDI, Gi2alpha/14-3-3, CBL/LCK, CD63, GAPDH, CD9, |
| | CD81, ANXA2, ENO1, SDCBP, MSN, MFGE8, EZR, GK, ANXA1, LAMP2, DPP4, |
| | TSG101, HSPA1A, GDI2, CLTC, LAMP1, Cd86, ANPEP, TFRC, SLC3A2, RDX, RAP1B, |
| | RAB5C, RAB5B, MYH9, ICAM1, FN1, RAB11B, PIGR, LGALS3, ITGB1, EHD1, CLIC1, |
| | ATP1A1, ARF1, RAP1A, P4HB, MUC1, KRT10, HLA-A, FLOT1, CD59, C1orf58, BASP1, |
| | TACSTD1, STOM |
| Vesicle markers | A33, a33 n15, AFP, ALA, ALIX, ALP, AnnexinV, APC, ASCA, ASPH (246-260), ASPH |
| | (666-680), ASPH (A-10), ASPH (D01P), ASPH (D03), ASPH (G-20), ASPH (H-300), |
| | AURKA, AURKB, B7H3, B7H4, BCA-225, BCNP, BDNF, BRCA, CA125 (MUC16), CA- |
| | 19-9, C-Bir, CD1.1, CD10, CD174 (Lewis y), CD24, CD44, CD46, CD59 (MEM-43), CD63, |
| | CD66e CEA, CD73, CD81, CD9, CDA, CDAC1 1a2, CEA, C-Erb2, C-erbB2, CRMP-2, |
| | CRP, CXCL12, CYFRA21-1, DLL4, DR3, EGFR, Epcam, EphA2, EphA2 (H-77), ER, |
| | ErbB4, EZH2, FASL, FRT, FRT c.f23, GDF15, GPCR, GPR30, Gro-alpha, HAP, HBD 1, |
| | HBD2, HER 3 (ErbB3), HSP, HSP70, hVEGFR2, iC3b, IL 6 Unc, IL-1B, IL6 Unc, IL6R, |
| | IL8, IL-8, INSIG-2, KLK2, L1CAM, LAMN, LDH, MACC-1, MAPK4, MART-1, MCP-1, |
| | M-CSF, MFG-E8, MIC1, MIF, MIS RII, MMG, MMP26, MMP7, MMP9, MS4A1, MUC1, |
| | MUC1 seq1, MUC1 seq11A, MUC17, MUC2, Ncam, NGAL, NPGP/NPFF2, OPG, OPN, |
| | p53, p53, PA2G4, PBP, PCSA, PDGFRB, PGP9.5, PIM1, PR (B), PRL, PSA, PSMA, |
| | PSME3, PTEN, R5-CD9 Tube 1, Reg IV, RUNX2, SCRN1, seprase, SERPINB3, SPARC, |
| | SPB, SPDEF, SRVN, STAT 3, STEAP1, TF (FL-295), TFF3, TGM2, TIMP-1, TIMP1, |
| | TIMP2, TMEM211, TMPRSS2, TNF-alpha, Trail-R2, Trail-R4, TrKB, TROP2, Tsg 101, |
| | TWEAK, UNC93A, VEGF A, YPSMA-1 |
| Vesicle markers | NSE, TRIM29, CD63, CD151, ASPH, LAMP2, TSPAN1, SNAIL, CD45, CKS1, NSE, |
| | FSHR, OPN, FTH1, PGP9, ANNEXIN 1, SPD, CD81, EPCAM, PTH1R, CEA, CYTO 7, |
| | CCL2, SPA, KRAS, TWIST1, AURKB, MMP9, P27, MMP1, HLA, HIF, CEACAM, |
| | CENPH, BTUB, INTG b4, EGFR, NACC1, CYTO 18, NAP2, CYTO 19, ANNEXIN V, |
| | TGM2, ERB2, BRCA1, B7H3, SFTPC, PNT, NCAM, MS4A1, P53, INGA3, MUC2, SPA, |
| | OPN, CD63, CD9, MUC1, UNCR3, PAN ADH, HCG, TIMP, PSMA, GPCR, RACK1, |
| | PSCA, VEGF, BMP2, CD81, CRP, PRO GRP, B7H3, MUC1, M2PK, CD9, PCSA, PSMA |
| Vesicle markers | TFF3, MS4A1, EphA2, GAL3, EGFR, N-gal, PCSA, CD63, MUC1, TGM2, CD81, DR3, |
| | MACC-1, TrKB, CD24, TIMP-1, A33, CD66 CEA, PRL, MMP9, MMP7, TMEM211, |
| | SCRN1, TROP2, TWEAK, CDACC1, UNC93A, APC, C-Erb, CD10, BDNF, FRT, GPR30, |
| | P53, SPR, OPN, MUC2, GRO-1, tsg 101, GDF15 |
| Vesicle markers | CD9, Erb2, Erb4, CD81, Erb3, MUC16, CD63, DLL4, HLA-Drpe, B7H3, IFNAR, 5T4, |
| | PCSA, MICB, PSMA, MFG-E8, Muc1, PSA, Muc2, Unc93a, VEGFR2, EpCAM, VEGF A, |
| | TMPRSS2, RAGE, PSCA, CD40, Muc17, IL-17-RA, CD80 |
| Benign Prostate | BCMA, CEACAM-1, HVEM, IL-1 R4, IL-10 Rb, Trappin-2, p53, hsa-miR-329, hsa-miR- |
| Hyperplasia (BPH) | 30a, hsa-miR-335, hsa-miR-152, hsa-miR-151-5p, hsa-miR-200a, hsa-miR-145, hsa-miR- |
| | 29a, hsa-miR-106b, hsa-miR-595, hsa-miR-142-5p, hsa-miR-99a, hsa-miR-20b, hsa-miR- |
| | 373, hsa-miR-502-5p, hsa-miR-29b, hsa-miR-142-3p, hsa-miR-663, hsa-miR-423-5p, hsa- |
| | miR-15a, hsa-miR-888, hsa-miR-361-3p, hsa-miR-365, hsa-miR-10b, hsa-miR-199a-3p, hsa- |
| | miR-181a, hsa-miR-19a, hsa-miR-125b, hsa-miR-760, hsa-miR-7a, hsa-miR-671-5p, hsa- |
| | miR-7c, hsa-miR-1979, hsa-miR-103 |
| Metastatic Prostate | hsa-miR-100, hsa-miR-1236, hsa-miR-1296, hsa-miR-141, hsa-miR-146b-5p, hsa-miR-17*, |
| Cancer | hsa-miR-181a, hsa-miR-200b, hsa-miR-20a*, hsa-miR-23a*, hsa-miR-331-3p, hsa-miR-375, |
| | hsa-miR-452, hsa-miR-572, hsa-miR-574-3p, hsa-miR-577, hsa-miR-582-3p, hsa-miR-937, |
| | miR-10a, miR-134, miR-141, miR-200b, miR-30a, miR-32, miR-375, miR-495, miR-564, |
| | miR-570, miR-574-3p, miR-885-3p |
| Metastatic Prostate | hsa-miR-200b, hsa-miR-375, hsa-miR-141, hsa-miR-331-3p, hsa-miR-181a, hsa-miR-574-3p |
| Cancer | |
| Prostate Cancer | hsa-miR-574-3p, hsa-miR-141, hsa-miR-432, hsa-miR-326, hsa-miR-2110, hsa-miR-181a- |
| | 2*, hsa-miR-107, hsa-miR-301a, hsa-miR-484, hsa-miR-625* |
| Metastatic Prostate | hsa-miR-582-3p, hsa-miR-20a*, hsa-miR-375, hsa-miR-200b, hsa-miR-379, hsa-miR-572, |
| Cancer | hsa-miR-513a-5p, hsa-miR-577, hsa-miR-23a*, hsa-miR-1236, hsa-miR-609, hsa-miR-17*, |
| | hsa-miR-130b, hsa-miR-619, hsa-miR-624*, hsa-miR-198 |
| Metastatic Prostate | FOX01A, SOX9, CLNS1A, PTGDS, XPO1, LETMD1, RAD23B, ABCC3, APC, CHES1, |
| Cancer | EDNRA, FRZB, HSPG2, TMPRSS2_ETV1 fusion |
| Prostate Cancer | hsa-let-7b, hsa-miR-107, hsa-miR-1205, hsa-miR-1270, hsa-miR-130b, hsa-miR-141, hsa- |
| | miR-143, hsa-miR-148b*, hsa-miR-150, hsa-miR-154*, hsa-miR-181a*, hsa-miR-181a-2*, |
| | hsa-miR-18a*, hsa-miR-19b-1*, hsa-miR-204, hsa-miR-2110, hsa-miR-215, hsa-miR-217, |
| | hsa-miR-219-2-3p, hsa-miR-23b*, hsa-miR-299-5p, hsa-miR-301a, hsa-miR-301a, hsa-miR- |
| | 326, hsa-miR-331-3p, hsa-miR-365*, hsa-miR-373*, hsa-miR-424, hsa-miR-424*, hsa-miR- |
| | 432, hsa-miR-450a, hsa-miR-451, hsa-miR-484, hsa-miR-497, hsa-miR-517*, hsa-miR-517a, |
| | hsa-miR-518f, hsa-miR-574-3p, hsa-miR-595, hsa-miR-617, hsa-miR-625*, hsa-miR-628-5p, |
| | hsa-miR-629, hsa-miR-634, hsa-miR-769-5p, hsa-miR-93, hsa-miR-96 |
| Prostate Cancer | CD9, PSMA, PCSA, CD63, CD81, B7H3, IL 6, OPG-13, IL6R, PA2G4, EZH2, RUNX2, |
| | SERPINB3, EpCam |
| Prostate Cancer | A33, a33 n15, AFP, ALA, ALIX, ALP, AnnexinV, APC, ASCA, ASPH (246-260), ASPH |
| | (666-680), ASPH (A-10), ASPH (D01P), ASPH (D03), ASPH (G-20), ASPH (H-300), |
| | AURKA, AURKB, B7H3, B7H4, BCA-225, BCNP, BDNF, BRCA, CA125 (MUC16), CA- |
| | 19-9, C-Bir, CD1.1, CD10, CD174 (Lewis y), CD24, CD44, CD46, CD59 (MEM-43), CD63, |
| | CD66e CEA, CD73, CD81, CD9, CDA, CDAC1 1a2, CEA, C-Erb2, C-erbB2, CRMP-2, |
| | CRP, CXCL12, CYFRA21-1, DLL4, DR3, EGFR, Epcam, EphA2, EphA2 (H-77), ER, |
| | ErbB4, EZH2, FASL, FRT, FRT c.f23, GDF15, GPCR, GPR30, Gro-alpha, HAP, HBD 1, |
| | HBD2, HER 3 (ErbB3), HSP, HSP70, hVEGFR2, iC3b, IL 6 Unc, IL-1B, IL6 Unc, IL6R, |
| | IL8, IL-8, INSIG-2, KLK2, L1CAM, LAMN, LDH, MACC-1, MAPK4, MART-1, MCP-1, |
| | M-CSF, MFG-E8, MIC1, MIF, MIS RII, MMG, MMP26, MMP7, MMP9, MS4A1, MUC1, |
| | MUC1 seq1, MUC1 seq11A, MUC17, MUC2, Ncam, NGAL, NPGP/NPFF2, OPG, OPN, |
| | p53, p53, PA2G4, PBP, PCSA, PDGFRB, PGP9.5, PIM1, PR (B), PRL, PSA, PSMA, |
| | PSME3, PTEN, R5-CD9 Tube 1, Reg IV, RUNX2, SCRN1, seprase, SERPINB3, SPARC, |
| | SPB, SPDEF, SRVN, STAT 3, STEAP1, TF (FL-295), TFF3, TGM2, TIMP-1, TIMP1, |
| | TIMP2, TMEM211, TMPRSS2, TNF-alpha, Trail-R2, Trail-R4, TrKB, TROP2, Tsg 101, |
| | TWEAK, UNC93A, VEGF A, YPSMA-1 |
| Prostate Cancer | 5T4, ACTG1, ADAM10, ADAM15, ALDOA, ANXA2, ANXA6, APOA1, ATP1A1, |
| Vesicle Markers | BASP1, C1orf58, C20orf114, C8B, CAPZA1, CAV1, CD151, CD2AP, CD59, CD9, CD9, |
| | CFL1, CFP, CHMP4B, CLTC, COTL1, CTNND1, CTSB, CTSZ, CYCS, DPP4, EEF1A1, |
| | EHD1, ENO1, F11R, F2, F5, FAM125A, FNBP1L, FOLH1, GAPDH, GLB1, GPX3, |
| | HIST1H1C, HIST1H2AB, HSP90AB1, HSPA1B, HSPA8, IGSF8, ITGB1, ITIH3, JUP, |
| | LDHA, LDHB, LUM, LYZ, MFGE8, MGAM, MMP9, MYH2, MYL6B, NME1, NME2, |
| | PABPC1, PABPC4, PACSIN2, PCBP2, PDCD6IP, PRDX2, PSA, PSMA, PSMA1, PSMA2, |
| | PSMA4, PSMA6, PSMA7, PSMB1, PSMB2, PSMB3, PSMB4, PSMB5, PSMB6, PSMB8, |
| | PTGFRN, RPS27A, SDCBP, SERINC5, SH3GL1, SLC3A2, SMPDL3B, SNX9, TACSTD1, |
| | TCN2, THBS1, TPI1, TSG101, TUBB, VDAC2, VPS37B, YWHAG, YWHAQ, YWHAZ |
| Prostate Cancer | FLNA, DCRN, HER 3 (ErbB3), VCAN, CD9, GAL3, CDADC1, GM-CSF, EGFR, RANK, |
| Vesicle Markers | CSA, PSMA, ChickenIgY, B7H3, PCSA, CD63, CD3, MUC1, TGM2, CD81, S100-A4, |
| | MFG-E8, Integrin, NK-2R(C-21), PSA, CD24, TIMP-1, IL6 Unc, PBP, PIM1, CA-19-9, |
| | Trail-R4, MMP9, PRL, EphA2, TWEAK, NY-ESO-1, Mammaglobin, UNC93A, A33, |
| | AURKB, CD41, XAGE-1, SPDEF, AMACR, seprase/FAP, NGAL, CXCL12, FRT, CD66e |
| | CEA, SIM2 (C-15), C-Bir, STEAP, PSIP1/LEDGF, MUC17, hVEGFR2, ERG, MUC2, |
| | ADAM10, ASPH (A-10), CA125, Gro-alpha, Tsg 101, SSX2, Trail-R4 |
| Prostate Cancer | NT5E (CD73), A33, ABL2, ADAM10, AFP, ALA, ALIX, ALPL, AMACR, Apo J/CLU, |
| Vesicle Markers | ASCA, ASPH (A-10), ASPH (D01P), AURKB, B7H3, B7H4, BCNP, BDNF, CA125 |
| | (MUC16), CA-19-9, C-Bir (Flagellin), CD10, CD151, CD24, CD3, CD41, CD44, CD46, |
| | CD59(MEM-43), CD63, CD66e CEA, CD81, CD9, CDA, CDADC1, C-erbB2, CRMP-2, |
| | CRP, CSA, CXCL12, CXCR3, CYFRA21-1, DCRN, DDX-1, DLL4, EGFR, EpCAM, |
| | EphA2, ERG, EZH2, FASL, FLNA, FRT, GAL3, GATA2, GM-CSF, Gro-alpha, HAP, |
| | HER3 (ErbB3), HSP70, HSPB1, hVEGFR2, iC3b, IL-1B, IL6 R, IL6 Unc, IL7 R |
| | alpha/CD127, IL8, INSIG-2, Integrin, KLK2, Label, LAMN, Mammaglobin, M-CSF, MFG- |
| | E8, MIF, MIS RII, MMP7, MMP9, MS4A1, MUC1, MUC17, MUC2, Ncam, NDUFB7, |
| | NGAL, NK-2R(C-21), NY-ESO-1, p53, PBP, PCSA, PDGFRB, PIM1, PRL, PSA, |
| | PSIP1/LEDGF, PSMA, RAGE, RANK, Reg IV, RUNX2, S100-A4, seprase/FAP, |
| | SERPINB3, SIM2 (C-15), SPARC, SPC, SPDEF, SPP1, SSX2, SSX4, STEAP, STEAP4, |
| | TFF3, TGM2, TIMP-1, TMEM211, Trail-R2, Trail-R4, TrKB (poly), Trop2, Tsg 101, |
| | TWEAK, UNC93A, VCAN, VEGF A, wnt-5a(C-16), XAGE, XAGE-1 |
| Prostate Vesicle | ADAM 9, ADAM10, AGR2, ALDOA, ALIX, ANXA1, ANXA2, ANXA4, ARF6, ATP1A3, |
| Membrane | B7H3, BCHE, BCL2L14 (Bcl G), BCNP1, BDKRB2, BDNFCAV1-Caveolin1, CCR2 (CC |
| | chemokine receptor 2, CD192), CCR5 (CC chemokine receptor 5), CCT2 (TCP1-beta), |
| | CD10, CD151, CD166/ALCAM, CD24, CD283/TLR3, CD41, CD46, CD49d (Integrin alpha |
| | 4, ITGA4), CD63, CD81, CD9, CD90/THY1, CDH1, CDH2, CDKN1A cyclin-dependent |
| | kinase inhibitor (p21), CGA gene (coding for the alpha subunit of glycoprotein hormones), |
| | CLDN3 - Claudin3, COX2 (PTGS2), CSE1L (Cellular Apoptosis Susceptibility), CXCR3, |
| | Cytokeratin 18, Eag1 (KCNH1), EDIL3 (del-1), EDNRB - Endothelial Receptor Type B, |
| | EGFR, EpoR, EZH2 (enhancer of Zeste Homolog2), EZR, FABP5, |
| | Farnesyltransferase/geranylgeranyl diphosphate synthase 1 (GGPS1), Fatty acid synthase |
| | (FASN), FTL (light and heavy), GAL3, GDF15-Growth Differentiation Factor 15, GloI, GM- |
| | CSF, GSTP1, H3F3A, HGF (hepatocyte growth factor), hK2/Kif2a, HSP90AA1, HSPA1A/ |
| | HSP70-1, HSPB1, IGFBP-2, IGFBP-3, IL1alpha, IL-6, IQGAP1, ITGAL (Integrin alpha L |
| | chain), Ki67, KLK1, KLK10, KLK11, KLK12, KLK13, KLK14, KLK15, KLK4, KLK5, |
| | KLK6, KLK7, KLK8, KLK9, Lamp-2, LDH-A, LGALS3BP, LGALS8, MMP 1, MMP 2, |
| | MMP 25, MMP 3, MMP10, MMP-14/MT1-MMP, MMP7, MTA1nAnS, Nav1.7, NKX3-1, |
| | Notch1, NRP1/CD304, PAP (ACPP), PGP, PhIP, PIP3/BPNT1, PKM2, PKP1 |
| | (plakophilin1), PKP3 (plakophilin3), Plasma chromogranin-A (CgA), PRDX2, Prostate |
| | secretory protein (PSP94)/β-Microseminoprotein (MSP)/IGBF, PSAP, PSMA, PSMA1, |
| | PTENPTPN13/PTPL1, RPL19, seprase/FAPSET, SLC3A2/CD98, SRVN, STEAP1, |
| | Syndecan/CD138, TGFB, TGM2, TIMP-1TLR4 (CD284), TLR9 (CD289), TMPRSS1/ |
| | hepsin, TMPRSS2, TNFR1, TNFα, Transferrin receptor/CD71/TRFR, Trop2 (TACSTD2), |
| | TWEAK uPA (urokinase plasminoge activator) degrades extracellular matrix, uPAR (uPA |
| | receptor)/CD87, VEGFR1, VEGFR2 |
| Prostate Vesicle | ADAM 34, ADAM 9, AGR2, ALDOA, ANXA1, ANXA 11, ANXA4, ANXA 7, ANXA2, |
| Markers | ARF6, ATP1A1, ATP1A2, ATP1A3, BCHE, BCL2L14 (Bcl G), BDKRB2, CA215, CAV1 - |
| | Caveolin1, CCR2 (CC chemokine receptor 2, CD192), CCR5 (CC chemokine receptor 5), |
| | CCT2 (TCP1-beta), CD166/ALCAM, CD49b (Integrin alpha 2, ITGA4), CD90/THY1, |
| | CDH1, CDH2, CDKN1A cyclin-dependent kinase inhibitor (p21), CGA gene (coding for the |
| | alpha subunit of glycoprotein hormones), CHMP4B, CLDN3 - Claudin3, CLSTN1 |
| | (Calsyntenin-1), COX2 (PTGS2), CSE1L (Cellular Apoptosis Susceptibility), Cytokeratin 18, |
| | Eag1 (KCNH1) (plasma membrane-K+-voltage gated channel), EDIL3 (del-1), EDNRB - |
| | Endothelial Receptor Type B, Endoglin/CD105, ENOX2 - Ecto-NOX disulphide Thiol |
| | exchanger 2, EPCA-2 Early prostate cancer antigen2, EpoR, EZH2 (enhancer of Zeste |
| | Homolog2), EZR, FABP5, Farnesyltransferase/geranylgeranyl diphosphate synthase 1 |
| | (GGPS1), Fatty acid synthase (FASN, plasma membrane protein), FTL (light and heavy), |
| | GDF15-Growth Differentiation Factor 15, GloI, GSTP1, H3F3A, HGF (hepatocyte growth |
| | factor), hK2 (KLK2), HSP90AA1, HSPA1A/HSP70-1, IGFBP-2, IGFBP-3, IL1alpha, IL-6, |
| | IQGAP1, ITGAL (Integrin alpha L chain), Ki67, KLK1, KLK10, KLK11, KLK12, KLK13, |
| | KLK14, KLK15, KLK4, KLK5, KLK6, KLK7, KLK8, KLK9, Lamp-2, LDH-A, |
| | LGALS3BP, LGALS8, MFAP5, MMP 1, MMP 2, MMP 24, MMP 25, MMP 3, MMP10, |
| | MMP-14/MT1-MMP, MTA1, nAnS, Nav1.7, NCAM2 - Neural cell Adhesion molecule 2, |
| | NGEP/D-TMPP/IPCA-5/ANO7, NKX3-1, Notch1, NRP1/CD304, PGP, PAP (ACPP), |
| | PCA3 - Prostate cancer antigen 3, Pdia3/ERp57, PhIP, phosphatidylethanolamine (PE), PIP3, |
| | PKP1 (plakophilin1), PKP3 (plakophilin3), Plasma chromogranin-A (CgA), PRDX2, Prostate |
| | secretory protein (PSP94)/β-Microseminoprotein (MSP)/IGBF, PSAP, PSMA1, PTEN, |
| | PTGFRN, PTPN13/PTPL1, PKM2, RPL19, SCA-1/ATXN1, SERINC5/TPO1, SET, |
| | SLC3A2/CD98, STEAP1, STEAP-3, SRVN, Syndecan/CD138, TGFB, Tissue Polypeptide |
| | Specific antigen TPS, TLR4 (CD284), TLR9 (CD289), TMPRSS1/hepsin, TMPRSS2, |
| | TNFR1, TNFα, CD283/TLR3, Transferrin receptor/CD71/TRFR, uPA (urokinase plasminoge |
| | activator), uPAR (uPA receptor)/CD87, VEGFR1, VEGFR2 |
| Prostate Cancer | hsa-miR-1974, hsa-miR-27b, hsa-miR-103, hsa-miR-146a, hsa-miR-22, hsa-miR-382, hsa- |
| Treatment | miR-23a, hsa-miR-376c, hsa-miR-335, hsa-miR-142-5p, hsa-miR-221, hsa-miR-142-3p, hsa- |
| | miR-151-3p, hsa-miR-21, hsa-miR-16 |
| Prostate Cancer | let-7d, miR-148a, miR-195, miR-25, miR-26b, miR-329, miR-376c, miR-574-3p, miR-888, |
| | miR-9, miR1204, miR-16-2*, miR-497, miR-588, miR-614, miR-765, miR92b*, miR-938, |
| | let-7f-2*, miR-300, miR-523, miR-525-5p, miR-1182, miR-1244, miR-520d-3p, miR-379, |
| | let-7b, miR-125a-3p, miR-1296, miR-134, miR-149, miR-150, miR-187, miR-32, miR-324- |
| | 3p, miR-324-5p, miR-342-3p, miR-378, miR-378*, miR-384, miR-451, miR-455-3p, miR- |
| | 485-3p, miR-487a, miR-490-3p, miR-502-5p, miR-548a-5p, miR-550, miR-562, miR-593, |
| | miR-593*, miR-595, miR-602, miR-603, miR-654-5p, miR-877*, miR-886-5p, miR-125a-5p, |
| | miR-140-3p, miR-192, miR-196a, miR-2110, miR-212, miR-222, miR-224*, miR-30b*, |
| | miR-499-3p, miR-505* |
| Prostate (PCSA + | miR-182, miR-663, miR-155, mirR-125a-5p, miR-548a-5p, miR-628-5p, miR-517*, miR- |
| cMVs) | 450a, miR-920, hsa-miR-619, miR-1913, miR-224*, miR-502-5p, miR-888, miR-376a, miR- |
| | 542-5p, miR-30b*, miR-1179 |
| Prostate Cancer | miR-183-96-182 cluster (miRs-183, 96 and 182), metal ion transporter such as hZIP1, |
| | SLC39A1, SLC39A2, SLC39A3, SLC39A4, SLC39A5, SLC39A6, SLC39A7, SLC39A8, |
| | SLC39A9, SLC39A10, SLC39A11, SLC39A12, SLC39A13, SLC39A14 |
| Prostate Cancer | RAD23B, FBP1, TNFRSF1A, CCNG2, NOTCH3, ETV1, BID, SIM2, LETMD1, ANXA1, |
| | miR-519d, miR-647 |
| Prostate Cancer | RAD23B, FBP1, TNFRSF1A, NOTCH3, ETV1, BID, SIM2, ANXA1, BCL2 |
| Prostate Cancer | ANPEP, ABL1, PSCA, EFNA1, HSPB1, INMT, TRIP13 |
| Prostate Cancer | E2F3, c-met, pRB, EZH2, e-cad, CAXII, CAIX, HIF-1α, Jagged, PIM-1, hepsin, RECK, |
| | Clusterin, MMP9, MTSP-1, MMP24, MMP15, IGFBP-2, IGFBP-3, E2F4, caveolin, EF-1A, |
| | Kallikrein 2, Kallikrein 3, PSGR |
| Prostate Cancer | A2ML1, BAX, C10orf47, C1orf162, CSDA, EIFC3, ETFB, GABARAPL2, GUK1, GZMH, |
| | HIST1H3B, HLA-A, HSP90AA1, NRGN, PRDX5, PTMA, RABAC1, RABAGAP1L, |
| | RPL22, SAP18, SEPW1, SOX1 |
| Prostate Cancer | NY-ESO-1, SSX-2, SSX-4, XAGE-lb, AMACR, p90 autoantigen, LEDGF |
| Prostate Cancer | A33, ABL2, ADAM10, AFP, ALA, ALIX, ALPL, ApoJ/CLU, ASCA, ASPH(A-10), |
| | ASPH(D01P), AURKB, B7H3, B7H3, B7H4, BCNP, BDNF, CA125(MUC16), CA-19-9, C- |
| | Bir, CD10, CD151, CD24, CD41, CD44, CD46, CD59(MEM-43), CD63, CD63, |
| | CD66eCEA, CD81, CD81, CD9, CD9, CDA, CDADC1, CRMP-2, CRP, CXCL12, CXCR3, |
| | CYFRA21-1, DDX-1, DLL4, DLL4, EGFR, Epcam, EphA2, ErbB2, ERG, EZH2, FASL, |
| | FLNA, FRT, GAL3, GATA2, GM-CSF, Gro-alpha, HAP, HER3(ErbB3), HSP70, HSPB1, |
| | hVEGFR2, iC3b, IL-1B, IL6R, IL6Unc, IL7Ralpha/CD127, IL8, INSIG-2, Integrin, KLK2, |
| | LAMN, Mammoglobin, M-CSF, MFG-E8, MIF, MISRII, MMP7, MMP9, MUC1, Muc1, |
| | MUC17, MUC2, Ncam, NDUFB7, NGAL, NK-2R(C-21), NT5E (CD73), p53, PBP, PCSA, |
| | PCSA, PDGFRB, PIM1, PRL, PSA, PSA, PSMA, PSMA, RAGE, RANK, RegIV, RUNX2, |
| | S100-A4, seprase/FAP, SERPINB3, SIM2(C-15), SPARC, SPC, SPDEF, SPP1, STEAP, |
| | STEAP4, TFF3, TGM2, TIMP-1, TMEM211, Trail-R2, Trail-R4, TrKB(poly), Trop2, |
| | Tsg101, TWEAK, UNC93A, VEGFA, wnt-5a(C-16) |
| Prostate Vesicles | CD9, CD63, CD81, PCSA, MUC2, MFG-E8 |
| Prostate Cancer | miR-148a, miR-329, miR-9, miR-378*, miR-25, miR-614, miR-518c*, miR-378, miR-765, |
| | let-7f-2*, miR-574-3p, miR-497, miR-32, miR-379, miR-520g, miR-542-5p, miR-342-3p, |
| | miR-1206, miR-663, miR-222 |
| Prostate Cancer | hsa-miR-877*, hsa-miR-593, hsa-miR-595, hsa-miR-300, hsa-miR-324-5p, hsa-miR-548a- |
| | 5p, hsa-miR-329, hsa-miR-550, hsa-miR-886-5p, hsa-miR-603, hsa-miR-490-3p, hsa-miR- |
| | 938, hsa-miR-149, hsa-miR-150, hsa-miR-1296, hsa-miR-384, hsa-miR-487a, hsa-miRPlus- |
| | C1089, hsa-miR-485-3p, hsa-miR-525-5p |
| Prostate Cancer | hsa-miR-451, hsa-miR-223, hsa-miR-593*, hsa-miR-1974, hsa-miR-486-5p, hsa-miR-19b, |
| | hsa-miR-320b, hsa-miR-92a, hsa-miR-21, hsa-miR-675*, hsa-miR-16, hsa-miR-876-5p, hsa- |
| | miR-144, hsa-miR-126, hsa-miR-137, hsa-miR-1913, hsa-miR-29b-1*, hsa-miR-15a, hsa- |
| | miR-93, hsa-miR-1266 |
| Inflammatory | miR-588, miR-1258, miR-16-2*, miR-938, miR-526b, miR-92b*, let-7d, miR-378*, miR- |
| Disease | 124, miR-376c, miR-26b, miR-1204, miR-574-3p, miR-195, miR-499-3p, miR-2110, miR- |
| | 888 |
| Prostate Cancer | A33, ADAM10, AMACR, ASPH (A-10), AURKB, B7H3, CA125, CA-19-9, C-Bir, CD24, |
| | CD3, CD41, CD63, CD66e CEA, CD81, CD9, CDADC1, CSA, CXCL12, DCRN, EGFR, |
| | EphA2, ERG, FLNA, FRT, GAL3, GM-CSF, Gro-alpha, HER 3 (ErbB3), hVEGFR2, IL6 |
| | Unc, Integrin, Mammaglobin, MFG-E8, MMP9, MUC1, MUC17, MUC2, NGAL, NK-2R(C- |
| | 21), NY-ESO-1, PBP, PCSA, PIM1, PRL, PSA, PSIP1/LEDGF, PSMA, RANK, S100-A4, |
| | seprase/FAP, SIM2 (C-15), SPDEF, SSX2, STEAP, TGM2, TIMP-1, Trail-R4, Tsg 101, |
| | TWEAK, UNC93A, VCAN, XAGE-1 |
| Prostate Cancer | A33, ADAM10, ALIX, AMACR, ASCA, ASPH (A-10), AURKB, B7H3, BCNP, CA125, |
| | CA-19-9, C-Bir (Flagellin), CD24, CD3, CD41, CD63, CD66e CEA, CD81, CD9, CDADC1, |
| | CRP, CSA, CXCL12, CYFRA21-1, DCRN, EGFR, EpCAM, EphA2, ERG, FLNA, GAL3, |
| | GATA2, GM-CSF, Gro alpha, HER3 (ErbB3), HSP70, hVEGFR2, iC3b, IL-1B, IL6 Unc, |
| | IL8, Integrin, KLK2, Mammaglobin, MFG-E8, MMP7, MMP9, MS4A1, MUC1, MUC17, |
| | MUC2, NGAL, NK-2R(C-21), NY-ESO-1, p53, PBP, PCSA, PIM1, PRL, PSA, PSMA, |
| | RANK, RUNX2, S100-A4, seprase/FAP, SERPINB3, SIM2 (C-15), SPC, SPDEF, SSX2, |
| | SSX4, STEAP, TGM2, TIMP-1, TRAIL R2, Trail-R4, Tsg 101, TWEAK, VCAN, VEGF A, |
| | XAGE |
| Prostate Vesicles | EpCam, CD81, PCSA, MUC2, MFG-E8 |
| Prostate Vesicles | CD9, CD63, CD81, MMP7, EpCAM |
| Prostate Cancer | let-7d, miR-148a, miR-195, miR-25, miR-26b, miR-329, miR-376c, miR-574-3p, miR-888, |
| | miR-9, miR1204, miR-16-2*, miR-497, miR-588, miR-614, miR-765, miR92b*, miR-938, |
| | let-7f-2*, miR-300, miR-523, miR-525-5p, miR-1182, miR-1244, miR-520d-3p, miR-379, |
| | let-7b, miR-125a-3p, miR-1296, miR-134, miR-149, miR-150, miR-187, miR-32, miR-324- |
| | 3p, miR-324-5p, miR-342-3p, miR-378, miR-378*, miR-384, miR-451, miR-455-3p, miR- |
| | 485-3p, miR-487a, miR-490-3p, miR-502-5p, miR-548a-5p, miR-550, miR-562, miR-593, |
| | miR-593*, miR-595, miR-602, miR-603, miR-654-5p, miR-877*, miR-886-5p, miR-125a-5p, |
| | miR-140-3p, miR-192, miR-196a, miR-2110, miR-212, miR-222, miR-224*, miR-30b*, |
| | miR-499-3p, miR-505* |
| Prostate Cancer | STAT3, EZH2, p53, MACC1, SPDEF, RUNX2, YB-1, AURKA, AURKB |
| Prostate Cancer | E.001036, E.001497, E.001561, E.002330, E.003402, E.003756, E.004838, E.005471, |
| (Ensembl ENSG | E.005882, E.005893, E.006210, E.006453, E.006625, E.006695, E.006756, E.007264, |
| identifiers) | E.007952, E.008118, E.008196, E.009694, E.009830, E.010244, E.010256, E.010278, |
| | E.010539, E.010810, E.011052, E.011114, E.011143, E.011304, E.011451, E.012061, |
| | E.012779, E.014216, E.014257, E.015133, E.015171, E.015479, E.015676, E.016402, |
| | E.018189, E.018699, E.020922, E.022976, E.023909, E.026508, E.026559, E.029363, |
| | E.029725, E.030582, E.033030, E.035141, E.036257, E.036448, E.038002, E.039068, |
| | E.039560, E.041353, E.044115, E.047410, E.047597, E.048544, E.048828, E.049239, |
| | E.049246, E.049883, E.051596, E.051620, E.052795, E.053108, E.054118, E.054938, |
| | E.056097, E.057252, E.057608, E.058729, E.059122, E.059378, E.059691, E.060339, |
| | E.060688, E.061794, E.061918, E.062485, E.063241, E.063244, E.064201, E.064489, |
| | E.064655, E.064886, E.065054, E.065057, E.065308, E.065427, E.065457, E.065485, |
| | E.065526, E.065548, E.065978, E.066455, E.066557, E.067248, E.067369, E.067704, |
| | E.068724, E.068885, E.069535, E.069712, E.069849, E.069869, E.069956, E.070501, |
| | E.070785, E.070814, E.071246, E.071626, E.071859, E.072042, E.072071, E.072110, |
| | E.072506, E.073050, E.073350, E.073584, E.073756, E.074047, E.074071, E.074964, |
| | E.075131, E.075239, E.075624, E.075651, E.075711, E.075856, E.075886, E.076043, |
| | E.076248, E.076554, E.076864, E.077097, E.077147, E.077312, E.077514, E.077522, |
| | E.078269, E.078295, E.078808, E.078902, E.079246, E.079313, E.079785, E.080572, |
| | E.080823, E.081087, E.081138, E.081181, E.081721, E.081842, E.082212, E.082258, |
| | E.082556, E.083093, E.083720, E.084234, E.084463, E.085224, E.085733, E.086062, |
| | E.086205, E.086717, E.087087, E.087301, E.088888, E.088899, E.088930, E.088992, |
| | E.089048, E.089127, E.089154, E.089177, E.089248, E.089280, E.089902, E.090013, |
| | E.090060, E.090565, E.090612, E.090615, E.090674, E.090861, E.090889, E.091140, |
| | E.091483, E.091542, E.091732, E.092020, E.092199, E.092421, E.092621, E.092820, |
| | E.092871, E.092978, E.093010, E.094755, E.095139, E.095380, E.095485, E.095627, |
| | E.096060, E.096384, E.099331, E.099715, E.099783, E.099785, E.099800, E.099821, |
| | E.099899, E.099917, E.099956, E.100023, E.100056, E.100065, E.100084, E.100142, |
| | E.100191, E.100216, E.100242, E.100271, E.100284, E.100299, E.100311, E.100348, |
| | E.100359, E.100393, E.100399, E.100401, E.100412, E.100442, E.100575, E.100577, |
| | E.100583, E.100601, E.100603, E.100612, E.100632, E.100714, E.100739, E.100796, |
| | E.100802, E.100815, E.100823, E.100836, E.100883, E.101057, E.101126, E.101152, |
| | E.101222, E.101246, E.101265, E.101365, E.101439, E.101557, E.101639, E.101654, |
| | E.101811, E.101812, E.101901, E.102030, E.102054, E.102103, E.102158, E.102174, |
| | E.102241, E.102290, E.102316, E.102362, E.102384, E.102710, E.102780, E.102904, |
| | E.103035, E.103067, E.103175, E.103194, E.103449, E.103479, E.103591, E.103599, |
| | E.103855, E.103978, E.104064, E.104067, E.104131, E.104164, E.104177, E.104228, |
| | E.104331, E.104365, E.104419, E.104442, E.104611, E.104626, E.104723, E.104760, |
| | E.104805, E.104812, E.104823, E.104824, E.105127, E.105220, E.105221, E.105281, |
| | E.105379, E.105402, E.105404, E.105409, E.105419, E.105428, E.105486, E.105514, |
| | E.105518, E.105618, E.105705, E.105723, E.105939, E.105948, E.106049, E.106078, |
| | E.106128, E.106153, E.106346, E.106392, E.106554, E.106565, E.106603, E.106633, |
| | E.107104, E.107164, E.107404, E.107485, E.107551, E.107581, E.107623, E.107798, |
| | E.107816, E.107833, E.107890, E.107897, E.107968, E.108296, E.108312, E.108375, |
| | E.108387, E.108405, E.108417, E.108465, E.108561, E.108582, E.108639, E.108641, |
| | E.108848, E.108883, E.108953, E.109062, E.109184, E.109572, E.109625, E.109758, |
| | E.109790, E.109814, E.109846, E.109956, E.110063, E.110066, E.110104, E.110107, |
| | E.110321, E.110328, E.110921, E.110955, E.111057, E.111218, E.111261, E.111335, |
| | E.111540, E.111605, E.111647, E.111785, E.111790, E.111801, E.111907, E.112039, |
| | E.112081, E.112096, E.112110, E.112144, E.112232, E.112234, E.112473, E.112578, |
| | E.112584, E.112715, E.112941, E.113013, E.113163, E.113282, E.113368, E.113441, |
| | E.113448, E.113522, E.113580, E.113645, E.113719, E.113739, E.113790, E.114054, |
| | E.114127, E.114302, E.114331, E.114388, E.114491, E.114861, E.114867, E.115053, |
| | E.115221, E.115234, E.115239, E.115241, E.115257, E.115339, E.115540, E.115541, |
| | E.115561, E.115604, E.115648, E.115738, E.115758, E.116044, E.116096, E.116127, |
| | E.116254, E.116288, E.116455, E.116478, E.116604, E.116649, E.116726, E.116754, |
| | E.116833, E.117298, E.117308, E.117335, E.117362, E.117411, E.117425, E.117448, |
| | E.117480, E.117592, E.117593, E.117614, E.117676, E.117713, E.117748, E.117751, |
| | E.117877, E.118181, E.118197, E.118260, E.118292, E.118513, E.118523, E.118640, |
| | E.118898, E.119121, E.119138, E.119318, E.119321, E.119335, E.119383, E.119421, |
| | E.119636, E.119681, E.119711, E.119820, E.119888, E.119906, E.120159, E.120328, |
| | E.120337, E.120370, E.120656, E.120733, E.120837, E.120868, E.120915, E.120948, |
| | E.121022, E.121057, E.121068, E.121104, E.121390, E.121671, E.121690, E.121749, |
| | E.121774, E.121879, E.121892, E.121903, E.121940, E.121957, E.122025, E.122033, |
| | E.122126, E.122507, E.122566, E.122705, E.122733, E.122870, E.122884, E.122952, |
| | E.123066, E.123080, E.123143, E.123154, E.123178, E.123416, E.123427, E.123595, |
| | E.123901, E.123908, E.123983, E.123992, E.124143, E.124164, E.124181, E.124193, |
| | E.124216, E.124232, E.124529, E.124562, E.124570, E.124693, E.124749, E.124767, |
| | E.124788, E.124795, E.124831, E.124942, E.125246, E.125257, E.125304, E.125352, |
| | E.125375, E.125445, E.125492, E.125676, E.125753, E.125798, E.125844, E.125868, |
| | E.125901, E.125944, E.125995, E.126062, E.126267, E.126653, E.126773, E.126777, |
| | E.126814, E.126858, E.126883, E.126934, E.126945, E.126952, E.127022, E.127328, |
| | E.127329, E.127399, E.127415, E.127554, E.127616, E.127720, E.127824, E.127884, |
| | E.127914, E.127946, E.127948, E.128050, E.128311, E.128342, E.128609, E.128626, |
| | E.128683, E.128708, E.128881, E.129315, E.129351, E.129355, E.129514, E.129636, |
| | E.129657, E.129757, E.129810, E.129990, E.130175, E.130177, E.130193, E.130255, |
| | E.130299, E.130305, E.130338, E.130340, E.130402, E.130413, E.130612, E.130713, |
| | E.130764, E.130770, E.130810, E.130826, E.130935, E.131351, E.131467, E.131473, |
| | E.131771, E.131773, E.132002, E.132275, E.132323, E.132382, E.132475, E.132481, |
| | E.132589, E.132646, E.132716, E.132881, E.133313, E.133315, E.133687, E.133835, |
| | E.133863, E.133874, E.133961, E.134077, E.134138, E.134207, E.134248, E.134308, |
| | E.134444, E.134452, E.134548, E.134684, E.134759, E.134809, E.134851, E.134955, |
| | E.135052, E.135297, E.135298, E.135387, E.135390, E.135476, E.135486, E.135525, |
| | E.135597, E.135679, E.135740, E.135829, E.135842, E.135870, E.135900, E.135914, |
| | E.135926, E.135940, E.135999, E.136044, E.136068, E.136152, E.136169, E.136280, |
| | E.136371, E.136383, E.136450, E.136521, E.136527, E.136574, E.136710, E.136750, |
| | E.136807, E.136874, E.136875, E.136930, E.136933, E.136935, E.137055, E.137124, |
| | E.137312, E.137409, E.137497, E.137513, E.137558, E.137601, E.137727, E.137776, |
| | E.137806, E.137814, E.137815, E.137948, E.137955, E.138028, E.138031, E.138041, |
| | E.138050, E.138061, E.138069, E.138073, E.138095, E.138160, E.138294, E.138347, |
| | E.138363, E.138385, E.138587, E.138594, E.138621, E.138674, E.138756, E.138757, |
| | E.138760, E.138772, E.138796, E.139211, E.139405, E.139428, E.139517, E.139613, |
| | E.139626, E.139684, E.139697, E.139874, E.140263, E.140265, E.140326, E.140350, |
| | E.140374, E.140382, E.140451, E.140481, E.140497, E.140632, E.140678, E.140694, |
| | E.140743, E.140932, E.141002, E.141012, E.141258, E.141378, E.141425, E.141429, |
| | E.141522, E.141543, E.141639, E.141744, E.141873, E.141994, E.142025, E.142208, |
| | E.142515, E.142606, E.142698, E.142765, E.142864, E.142875, E.143013, E.143294, |
| | E.143321, E.143353, E.143374, E.143375, E.143390, E.143578, E.143614, E.143621, |
| | E.143633, E.143771, E.143797, E.143816, E.143889, E.143924, E.143933, E.143947, |
| | E.144136, E.144224, E.144306, E.144381, E.144410, E.144485, E.144566, E.144671, |
| | E.144741, E.144935, E.145020, E.145632, E.145741, E.145833, E.145888, E.145907, |
| | E.145908, E.145919, E.145990, E.146067, E.146070, E.146281, E.146433, E.146457, |
| | E.146535, E.146701, E.146856, E.146966, E.147044, E.147127, E.147130, E.147133, |
| | E.147140, E.147231, E.147257, E.147403, E.147475, E.147548, E.147697, E.147724, |
| | E.148158, E.148396, E.148488, E.148672, E.148737, E.148835, E.149182, E.149218, |
| | E.149311, E.149480, E.149548, E.149646, E.150051, E.150593, E.150961, E.150991, |
| | E.151092, E.151093, E.151247, E.151304, E.151491, E.151690, E.151715, E.151726, |
| | E.151779, E.151806, E.152086, E.152207, E.152234, E.152291, E.152359, E.152377, |
| | E.152409, E.152422, E.152582, E.152763, E.152818, E.152942, E.153113, E.153140, |
| | E.153391, E.153904, E.153936, E.154099, E.154127, E.154380, E.154639, E.154723, |
| | E.154781, E.154832, E.154864, E.154889, E.154957, E.155368, E.155380, E.155508, |
| | E.155660, E.155714, E.155959, E.155980, E.156006, E.156194, E.156282, E.156304, |
| | E.156467, E.156515, E.156603, E.156650, E.156735, E.156976, E.157064, E.157103, |
| | E.157502, E.157510, E.157538, E.157551, E.157637, E.157764, E.157827, E.157992, |
| | E.158042, E.158290, E.158321, E.158485, E.158545, E.158604, E.158669, E.158715, |
| | E.158747, E.158813, E.158863, E.158901, E.158941, E.158987, E.159147, E.159184, |
| | E.159348, E.159363, E.159387, E.159423, E.159658, E.159692, E.159761, E.159921, |
| | E.160049, E.160226, E.160285, E.160294, E.160633, E.160685, E.160691, E.160789, |
| | E.160862, E.160867, E.160948, E.160972, E.161202, E.161267, E.161649, E.161692, |
| | E.161714, E.161813, E.161939, E.162069, E.162298, E.162385, E.162437, E.162490, |
| | E.162613, E.162641, E.162694, E.162910, E.162975, E.163041, E.163064, E.163110, |
| | E.163257, E.163468, E.163492, E.163530, E.163576, E.163629, E.163644, E.163749, |
| | E.163755, E.163781, E.163825, E.163913, E.163923, E.163930, E.163932, E.164045, |
| | E.164051, E.164053, E.164163, E.164244, E.164270, E.164300, E.164309, E.164442, |
| | E.164488, E.164520, E.164597, E.164749, E.164754, E.164828, E.164916, E.164919, |
| | E.164924, E.165084, E.165119, E.165138, E.165215, E.165259, E.165264, E.165280, |
| | E.165359, E.165410, E.165496, E.165637, E.165646, E.165661, E.165688, E.165695, |
| | E.165699, E.165792, E.165807, E.165813, E.165898, E.165923, E.165934, E.166263, |
| | E.166266, E.166329, E.166337, E.166341, E.166484, E.166526, E.166596, E.166598, |
| | E.166710, E.166747, E.166833, E.166860, E.166946, E.166971, E.167004, E.167085, |
| | E.167110, E.167113, E.167258, E.167513, E.167552, E.167553, E.167604, E.167635, |
| | E.167642, E.167658, E.167699, E.167744, E.167751, E.167766, E.167772, E.167799, |
| | E.167815, E.167969, E.167978, E.167987, E.167996, E.168014, E.168036, E.168066, |
| | E.168071, E.168148, E.168298, E.168393, E.168575, E.168653, E.168746, E.168763, |
| | E.168769, E.168803, E.168916, E.169087, E.169093, E.169122, E.169189, E.169213, |
| | E.169242, E.169410, E.169418, E.169562, E.169592, E.169612, E.169710, E.169763, |
| | E.169789, E.169807, E.169826, E.169957, E.170017, E.170027, E.170037, E.170088, |
| | E.170144, E.170275, E.170310, E.170315, E.170348, E.170374, E.170381, E.170396, |
| | E.170421, E.170430, E.170445, E.170549, E.170632, E.170703, E.170743, E.170837, |
| | E.170854, E.170906, E.170927, E.170954, E.170959, E.171121, E.171155, E.171180, |
| | E.171202, E.171262, E.171302, E.171345, E.171428, E.171488, E.171490, E.171492, |
| | E.171540, E.171643, E.171680, E.171723, E.171793, E.171861, E.171953, E.172115, |
| | E.172283, E.172345, E.172346, E.172466, E.172590, E.172594, E.172653, E.172717, |
| | E.172725, E.172733, E.172831, E.172867, E.172893, E.172939, E.173039, E.173230, |
| | E.173366, E.173473, E.173540, E.173585, E.173599, E.173714, E.173726, E.173805, |
| | E.173809, E.173826, E.173889, E.173898, E.173905, E.174021, E.174100, E.174332, |
| | E.174842, E.174996, E.175063, E.175110, E.175166, E.175175, E.175182, E.175198, |
| | E.175203, E.175216, E.175220, E.175334, E.175416, E.175602, E.175866, E.175946, |
| | E.176102, E.176105, E.176155, E.176171, E.176371, E.176515, E.176900, E.176971, |
| | E.176978, E.176994, E.177156, E.177239, E.177354, E.177409, E.177425, E.177459, |
| | E.177542, E.177548, E.177565, E.177595, E.177628, E.177674, E.177679, E.177694, |
| | E.177697, E.177731, E.177752, E.177951, E.178026, E.178078, E.178104, E.178163, |
| | E.178175, E.178187, E.178234, E.178381, E.178473, E.178741, E.178828, E.178950, |
| | E.179091, E.179115, E.179119, E.179348, E.179388, E.179776, E.179796, E.179869, |
| | E.179912, E.179981, E.180035, E.180198, E.180287, E.180318, E.180667, E.180869, |
| | E.180979, E.180998, E.181072, E.181163, E.181222, E.181234, E.181513, E.181523, |
| | E.181610, E.181773, E.181873, E.181885, E.181924, E.182013, E.182054, E.182217, |
| | E.182271, E.182318, E.182319, E.182512, E.182732, E.182795, E.182872, E.182890, |
| | E.182944, E.183048, E.183092, E.183098, E.183128, E.183207, E.183292, E.183431, |
| | E.183520, E.183684, E.183723, E.183785, E.183831, E.183856, E.184007, E.184047, |
| | E.184113, E.184156, E.184254, E.184363, E.184378, E.184470, E.184481, E.184508, |
| | E.184634, E.184661, E.184697, E.184708, E.184735, E.184840, E.184916, E.185043, |
| | E.185049, E.185122, E.185219, E.185359, E.185499, E.185554, E.185591, E.185619, |
| | E.185736, E.185860, E.185896, E.185945, E.185972, E.186198, E.186205, E.186376, |
| | E.186472, E.186575, E.186591, E.186660, E.186814, E.186834, E.186868, E.186889, |
| | E.187097, E.187323, E.187492, E.187634, E.187764, E.187792, E.187823, E.187837, |
| | E.187840, E.188021, E.188171, E.188186, E.188739, E.188771, E.188846, E.189060, |
| | E.189091, E.189143, E.189144, E.189221, E.189283, E.196236, E.196419, E.196436, |
| | E.196497, E.196504, E.196526, E.196591, E.196700, E.196743, E.196796, E.196812, |
| | E.196872, E.196975, E.196993, E.197081, E.197157, E.197217, E.197223, E.197299, |
| | E.197323, E.197353, E.197451, E.197479, E.197746, E.197779, E.197813, E.197837, |
| | E.197857, E.197872, E.197969, E.197976, E.198001, E.198033, E.198040, E.198087, |
| | E.198131, E.198156, E.198168, E.198205, E.198216, E.198231, E.198265, E.198366, |
| | E.198431, E.198455, E.198563, E.198586, E.198589, E.198712, E.198721, E.198732, |
| | E.198783, E.198793, E.198804, E.198807, E.198824, E.198841, E.198951, E.203301, |
| | E.203795, E.203813, E.203837, E.203879, E.203908, E.204231, E.204316, E.204389, |
| | E.204406, E.204560, E.204574 |
| Prostate Markers | E.005893 (LAMP2), E.006756 (ARSD), E.010539 (ZNF200), E.014257 (ACPP), E.015133 |
| (Ensembl ENSG | (CCDC88C), E.018699 (TTC27), E.044115 (CTNNA1), E.048828 (FAM120A), E.051620 |
| identifiers) | (HEBP2), E.056097 (ZFR), E.060339 (CCAR1), E.063241 (ISOC2), E.064489 (MEF2BNB- |
| | MEF2B), E.064886 (CHI3L2), E.066455 (GOLGA5), E.069535 (MAOB), E.072042 |
| | (RDH11), E.072071 (LPHN1), E.074047 (GLI2), E.076248 (UNG), E.076554 (TPD52), |
| | E.077147 (TM9SF3), E.077312 (SNRPA), E.081842 (PCDHA6), E.086717 (PPEF1), |
| | E.088888 (MAVS), E.088930 (XRN2), E.089902 (RCOR1), E.090612 (ZNF268), E.092199 |
| | (HNRNPC), E.095380 (NANS), E.099783 (HNRNPM), E.100191 (SLC5A4), E.100216 |
| | (TOMM22), E.100242 (SUN2), E.100284 (TOM1), E.100401 (RANGAP1), E.100412 |
| | (ACO2), E.100836 (PABPN1), E.102054 (RBBP7), E.102103 (PQBP1), E.103599 (IQCH), |
| | E.103978 (TMEM87A), E.104177 (MYEF2), E.104228 (TRIM35), E.105428 (ZNRF4), |
| | E.105518 (TMEM205), E.106603 (C7orf44; COA1), E.108405 (P2RX1), E.111057 |
| | (KRT18), E.111218 (PRMT8), E.112081 (SRSF3), E.112144 (ICK), E.113013 (HSPA9), |
| | E.113368 (LMNB1), E.115221 (ITGB6), E.116096 (SPR), E.116754 (SRSF11), E.118197 |
| | (DDX59), E.118898 (PPL), E.119121 (TRPM6), E.119711 (ALDH6A1), E.120656 (TAF12), |
| | E.121671 (CRY2), E.121774 (KHDRBS1), E.122126 (OCRL), E.122566 (HNRNPA2B1), |
| | E.123901 (GPR83), E.124562 (SNRPC), E.124788 (ATXN1), E.124795 (DEK), E.125246 |
| | (CLYBL), E.126883 (NUP214), E.127616 (SMARCA4), E.127884 (ECHS1), E.128050 |
| | (PAICS), E.129351 (ILF3), E.129757 (CDKN1C), E.130338 (TULP4), E.130612 |
| | (CYP2G1P), E.131351 (HAUS8), E.131467 (PSME3), E.133315 (MACROD1), E.134452 |
| | (FBXO18), E.134851 (TMEM165), E.135940 (COX5B), E.136169 (SETDB2), E.136807 |
| | (CDK9), E.137727 (ARHGAP20), E.138031 (ADCY3), E.138050 (THUMPD2), E.138069 |
| | (RAB1A), E.138594 (TMOD3), E.138760 (SCARB2), E.138796 (HADH), E.139613 |
| | (SMARCC2), E.139684 (ESD), E.140263 (SORD), E.140350 (ANP32A), E.140632 |
| | (GLYR1), E.142765 (SYTL1), E.143621 (ILF2), E.143933 (CALM2), E.144410 (CPO), |
| | E.147127 (RAB41), E.151304 (SRFBP1), E.151806 (GUF1), E.152207 (CYSLTR2), |
| | E.152234 (ATP5A1), E.152291 (TGOLN2), E.154723 (ATP5J), E.156467 (UQCRB), |
| | E.159387 (IRX6), E.159761 (C16orf86), E.161813 (LARP4), E.162613 (FUBP1), E.162694 |
| | (EXTL2), E.165264 (NDUFB6), E.167113 (COQ4), E.167513 (CDT1), E.167772 |
| | (ANGPTL4), E.167978 (SRRM2), E.168916 (ZNF608), E.169763 (PRYP3), E.169789 |
| | (PRY), E.169807 (PRY2), E.170017 (ALCAM), E.170144 (HNRNPA3), E.170310 (STX8), |
| | E.170954 (ZNF415), E.170959 (DCDC5), E.171302 (CANT1), E.171643 (S100Z), E.172283 |
| | (PRYP4), E.172590 (MRPL52), E.172867 (KRT2), E.173366 (TLR9), E.173599 (PC), |
| | E.177595 (PIDD), E.178473 (UCN3), E.179981 (TSHZ1), E.181163 (NPM1), E.182319 |
| | (Tyrosine-protein kinase SgK223), E.182795 (C1orf116), E.182944 (EWSR1), E.183092 |
| | (BEGAIN), E.183098 (GPC6), E.184254 (ALDH1A3), E.185619 (PCGF3), E.186889 |
| | (TMEM17), E.187837 (HIST1H1C), E.188771 (C11orf34), E.189060 (H1F0), E.196419 |
| | (XRCC6), E.196436 (NPIPL2), E.196504 (PRPF40A), E.196796, E.196993, E.197451 |
| | (HNRNPAB), E.197746 (PSAP), E.198131 (ZNF544), E.198156, E.198732 (SMOC1), |
| | E.198793 (MTOR), E.039068 (CDH1), E.173230 (GOLGB1), E.124193 (SRSF6), E.140497 |
| | (SCAMP2), E.168393 (DTYMK), E.184708 (EIF4ENIF1), E.124164 (VAPB), E.125753 |
| | (VASP), E.118260 (CREB1), E.135052 (GOLM1), E.010244 (ZNF207), E.010278 (CD9), |
| | E.047597 (XK), E.049246 (PER3), E.069849 (ATP1B3), E.072506 (HSD17B10), E.081138 |
| | (CDH7), E.099785 (MARCH2), E.104331 (IMPAD1), E.104812 (GYS1), E.120868 |
| | (APAF1), E.123908 (EIF2C2), E.125492 (BARHL1), E.127328 (RAB3IP), E.127329 |
| | (PTPRB), E.129514 (FOXA1), E.129657 (SEC14L1), E.129990 (SYT5), E.132881 (RSG1), |
| | E.136521 (NDUFB5), E.138347 (MYPN), E.141429 (GALNT1), E.144566 (RAB5A), |
| | E.151715 (TMEM45B), E.152582 (SPEF2), E.154957 (ZNF18), E.162385 (MAGOH), |
| | E.165410 (CFL2), E.168298 (HIST1H1E), E.169418 (NPR1), E.178187 (ZNF454), |
| | E.178741 (COX5A), E.179115 (FARSA), E.182732 (RGS6), E.183431 (SF3A3), E.185049 |
| | (WHSC2), E.196236 (XPNPEP3), E.197217 (ENTPD4), E.197813, E.203301, E.116833 |
| | (NR5A2), E.121057 (AKAP1), E.005471 (ABCB4), E.071859 (FAM50A), E.084234 |
| | (APLP2), E.101222 (SPEF1), E.103175 (WFDC1), E.103449 (SALL1), E.104805 (NUCB1), |
| | E.105514 (RAB3D), E.107816 (LZTS2), E.108375 (RNF43), E.109790 (KLHL5), E.112039 |
| | (FANCE), E.112715 (VEGFA), E.121690 (DEPDC7), E.125352 (RNF113A), E.134548 |
| | (C12orf39), E.136152 (COG3), E.143816 (WNT9A), E.147130 (ZMYM3), E.148396 |
| | (SEC16A), E.151092 (NGLY1), E.151779 (NBAS), E.155508 (CNOT8), E.163755 (HPS3), |
| | E.166526 (ZNF3), E.172733 (PURG), E.176371 (ZSCAN2), E.177674 (AGTRAP), |
| | E.181773 (GPR3), E.183048 (SLC25A10; MRPL12 SLC25A10), E.186376 (ZNF75D), |
| | E.187323 (DCC), E.198712 (MT-CO2), E.203908 (C6orf221; KHDC3L), E.001497 |
| | (LAS1L), E.009694 (ODZ1), E.080572 (CXorf41; PIH1D3), E.083093 (PALB2), E.089048 |
| | (ESF1), E.100065 (CARD10), E.100739 (BDKRB1), E.102904 (TSNAXIP1), E.104824 |
| | (HNRNPL), E.107404 (DVL1), E.110066 (SUV420H1), E.120328 (PCDHB12), E.121903 |
| | (ZSCAN20), E.122025 (FLT3), E.136930 (PSMB7), E.142025 (DMRTC2), E.144136 |
| | (SLC20A1), E.146535 (GNA12), E.147140 (NONO), E.153391 (INO80C), E.164919 |
| | (COX6C), E.171540 (OTP), E.177951 (BET1L), E.179796 (LRRC3B), E.197479 |
| | (PCDHB11), E.198804 (MT-CO1), E.086205 (FOLH1), E.100632 (ERH), E.100796 |
| | (SMEK1), E.104760 (FGL1), E.114302 (PRKAR2A), E.130299 (GTPBP3), E.133961 |
| | (NUMB), E.144485 (HES6), E.167085 (PHB), E.167635 (ZNF146), E.177239 (MAN1B1), |
| | E.184481 (FOXO4), E.188171 (ZNF626), E.189221 (MAOA), E.157637 (SLC38A10), |
| | E.100883 (SRP54), E.105618 (PRPF31), E.119421 (NDUFA8), E.170837 (GPR27), |
| | E.168148 (HIST3H3), E.135525 (MAP7), E.174996 (KLC2), E.018189 (RUFY3), E.183520 |
| | (UTP11L), E.173905 (GOLIM4), E.165280 (VCP), E.022976 (ZNF839), E.059691 |
| | (PET112), E.063244 (U2AF2), E.075651 (PLD1), E.089177 (KIF16B), E.089280 (FUS), |
| | E.094755 (GABRP), E.096060 (FKBP5), E.100023 (PPIL2), E.100359 (SGSM3), E.100612 |
| | (DHRS7), E.104131 (EIF3J), E.104419 (NDRG1), E.105409 (ATP1A3), E.107623 (GDF10), |
| | E.111335 (OAS2), E.113522 (RAD50), E.115053 (NCL), E.120837 (NFYB), E.122733 |
| | (KIAA1045), E.123178 (SPRYD7), E.124181 (PLCG1), E.126858 (RHOT1), E.128609 |
| | (NDUFA5), E.128683 (GAD1), E.130255 (RPL36), E.133874 (RNF122), E.135387 |
| | (CAPRIN1), E.135999 (EPC2), E.136383 (ALPK3), E.139405 (C12orf52), E.141012 |
| | (GALNS), E.143924 (EML4), E.144671 (SLC22A14), E.145741 (BTF3), E.145907 |
| | (G3BP1), E.149311 (ATM), E.153113 (CAST), E.157538 (DSCR3), E.157992 (KRTCAP3), |
| | E.158901 (WFDC8), E.165259 (HDX), E.169410 (PTPN9), E.170421 (KRT8), E.171155 |
| | (C1GALT1C1), E.172831 (CES2), E.173726 (TOMM20), E.176515, E.177565 (TBL1XR1), |
| | E.177628 (GBA), E.179091 (CYC1), E.189091 (SF3B3), E.197299 (BLM), E.197872 |
| | (FAM49A), E.198205 (ZXDA), E.198455 (ZXDB), E.082212 (ME2), E.109956 (B3GAT1), |
| | E.169710 (FASN), E.011304 (PTBP1), E.057252 (SOAT1), E.059378 (PARP12), E.082258 |
| | (CCNT2), E.087301 (TXNDC16), E.100575 (TIMM9), E.101152 (DNAJC5), E.101812 |
| | (H2BFM), E.102384 (CENPI), E.108641 (B9D1), E.119138 (KLF9), E.119820 (YIPF4), |
| | E.125995 (ROMO1), E.132323 (ILKAP), E.134809 (TIMM10), E.134955 (SLC37A2), |
| | E.135476 (ESPL1), E.136527 (TRA2B), E.137776 (SLTM), E.139211 (AMIGO2), E.139428 |
| | (MMAB), E.139874 (SSTR1), E.143321 (HDGF), E.164244 (PRRC1), E.164270 (HTR4), |
| | E.165119 (HNRNPK), E.165637 (VDAC2), E.165661 (QSOX2), E.167258 (CDK12), |
| | E.167815 (PRDX2), E.168014 (C2CD3), E.168653 (NDUFS5), E.168769 (TET2), E.169242 |
| | (EFNA1), E.175334 (BANF1), E.175416 (CLTB), E.177156 (TALDO1), E.180035 (ZNF48), |
| | E.186591 (UBE2H), E.187097 (ENTPD5), E.188739 (RBM34), E.196497 (IPO4), E.197323 |
| | (TRIM33), E.197857 (ZNF44), E.197976 (AKAP17A), E.064201 (TSPAN32), E.088992 |
| | (TESC), E.092421 (SEMA6A), E.100601 (ALKBH1), E.101557 (USP14), E.103035 |
| | (PSMD7), E.106128 (GHRHR), E.115541 (HSPE1), E.121390 (PSPC1), E.124216 (SNAI1), |
| | E.130713 (EXOSC2), E.132002 (DNAJB1), E.139697 (SBNO1), E.140481 (CCDC33), |
| | E.143013 (LMO4), E.145020 (AMT), E.145990 (GFOD1), E.146070 (PLA2G7), E.164924 |
| | (YWHAZ), E.165807 (PPP1R36), E.167751 (KLK2), E.169213 (RAB3B), E.170906 |
| | (NDUFA3), E.172725 (CORO1B), E.174332 (GLIS1), E.181924 (CHCHD8), E.183128 |
| | (CALHM3), E.204560 (DHX16), E.204574 (ABCF1), E.146701 (MDH2), E.198366 |
| | (HIST1H3A), E.081181 (ARG2), E.185896 (LAMP1), E.077514 (POLD3), E.099800 |
| | (TIMM13), E.100299 (ARSA), E.105419 (MEIS3), E.108417 (KRT37), E.113739 (STC2), |
| | E.125868 (DSTN), E.145908 (ZNF300), E.168575 (SLC20A2), E.182271 (TMIGD1), |
| | E.197223 (C1D), E.186834 (HEXIM1), E.001561 (ENPP4), E.011451 (WIZ), E.053108 |
| | (FSTL4), E.064655 (EYA2), E.065308 (TRAM2), E.075131 (TIPIN), E.081087 (OSTM1), |
| | E.092020 (PPP2R3C), E.096384 (HSP90AB1), E.100348 (TXN2), E.100577 (GSTZ1), |
| | E.100802 (C14orf93), E.101365 (IDH3B), E.101654 (RNMT), E.103067 (ESRP2), E.104064 |
| | (GABPB1), E.104823 (ECH1), E.106565 (TMEM176B), E.108561 (C1QBP), E.115257 |
| | (PCSK4), E.116127 (ALMS1), E.117411 (B4GALT2), E.119335 (SET), E.120337 |
| | (TNFSF18), E.122033 (MTIF3), E.122507 (BBS9), E.122870 (BICC1), E.130177 (CDC16), |
| | E.130193 (C8orf55; THEM6), E.130413 (STK33), E.130770 (ATPIF1), E.133687 (TMTC1), |
| | E.136874 (STX17), E.137409 (MTCH1), E.139626 (ITGB7), E.141744 (PNMT), E.145888 |
| | (GLRA1), E.146067 (FAM193B), E.146433 (TMEM181), E.149480 (MTA2), E.152377 |
| | (SPOCK1), E.152763 (WDR78), E.156976 (EIF4A2), E.157827 (FMNL2), E.158485 |
| | (CD1B), E.158863 (FAM160B2), E.161202 (DVL3), E.161714 (PLCD3), E.163064 (EN1), |
| | E.163468 (CCT3), E.164309 (CMYA5), E.164916 (FOXK1), E.165215 (CLDN3), E.167658 |
| | (EEF2), E.170549 (IRX1), E.171680 (PLEKHG5), E.178234 (GALNT11), E.179869 |
| | (ABCA13), E.179912 (R3HDM2), E.180869 (C1orf180), E.180979 (LRRC57), E.182872 |
| | (RBM10), E.183207 (RUVBL2), E.184113 (CLDN5), E.185972 (CCIN), E.189144 |
| | (ZNF573), E.197353 (LYPD2), E.197779 (ZNF81), E.198807 (PAX9), E.100442 (FKBP3), |
| | E.111790 (FGFR1OP2), E.136044 (APPL2), E.061794 (MRPS35), E.065427 (KARS), |
| | E.068885 (IFT80), E.104164 (PLDN; BLOC1S6), E.105127 (AKAP8), E.123066 |
| | (MED13L), E.124831 (LRRFIP1), E.125304 (TM9SF2), E.126934 (MAP2K2), E.130305 |
| | (NSUN5), E.135298 (BAI3), E.135900 (MRPL44), E.136371 (MTHFS), E.136574 |
| | (GATA4), E.140326 (CDAN1), E.141378 (PTRH2), E.141543 (EIF4A3), E.150961 |
| | (SEC24D), E.155368 (DBI), E.161649 (CD300LG), E.161692 (DBF4B), E.162437 |
| | (RAVER2), E.163257 (DCAF16), E.163576 (EFHB), E.163781 (TOPBP1), E.163913 |
| | (IFT122), E.164597 (COG5), E.165359 (DDX26B), E.165646 (SLC18A2), E.169592 |
| | (INO80E), E.169957 (ZNF768), E.171492 (LRRC8D), E.171793 (CTPS; CTPS1), E.171953 |
| | (ATPAF2), E.175182 (FAM131A), E.177354 (C10orf71), E.181610 (MRPS23), E.181873 |
| | (IBA57), E.187792 (ZNF70), E.187823 (ZCCHC16), E.196872 (C2orf55; KIAA1211L), |
| | E.198168 (SVIP), E.160633 (SAFB), E.177697 (CD151), E.181072 (CHRM2), E.012779 |
| | (ALOX5), E.065054 (SLC9A3R2), E.074071 (MRPS34), E.100815 (TRIP11), E.102030 |
| | (NAA10), E.106153 (CHCHD2), E.126814 (TRMT5), E.126952 (NXF5), E.136450 |
| | (SRSF1), E.136710 (CCDC115), E.137124 (ALDH1B1), E.143353 (LYPLAL1), E.162490 |
| | (C1orf187; DRAXIN), E.167799 (NUDT8), E.171490 (RSL1D1), E.173826 (KCNH6), |
| | E.173898 (SPTBN2), E.176900 (OR51T1), E.181513 (ACBD4), E.185554 (NXF2), |
| | E.185945 (NXF2B), E.108848 (LUC7L3), E.029363 (BCLAF1), E.038002 (AGA), E.108312 |
| | (UBTF), E.166341 (DCHS1), E.054118 (THRAP3), E.135679 (MDM2), E.166860 |
| | (ZBTB39), E.183684 (THOC4; ALYREF), E.004838 (ZMYND10), E.007264 (MATK), |
| | E.020922 (MRE11A), E.041353 (RAB27B), E.052795 (FNIP2), E.075711 (DLG1), |
| | E.087087 (SRRT), E.090060 (PAPOLA), E.095139 (ARCN1), E.099715 (PCDH11Y), |
| | E.100271 (TTLL1), E.101057 (MYBL2), E.101265 (RASSF2), E.101901 (ALG13), |
| | E.102290 (PCDH11X), E.103194 (USP10), E.106554 (CHCHD3), E.107833 (NPM3), |
| | E.110063 (DCPS), E.111540 (RAB5B), E.113448 (PDE4D), E.115339 (GALNT3), |
| | E.116254 (CHD5), E.117425 (PTCH2), E.117614 (SYF2), E.118181 (RPS25), E.118292 |
| | (C1orf54), E.119318 (RAD23B), E.121022 (COPS5), E.121104 (FAM117A), E.123427 |
| | (METTL21B), E.125676 (THOC2), E.132275 (RRP8), E.137513 (NARS2), E.138028 |
| | (CGREF1), E.139517 (LNX2), E.143614 (GATAD2B), E.143889 (HNRPLL), E.145833 |
| | (DDX46), E.147403 (RPL10), E.148158 (SNX30), E.151690 (MFSD6), E.153904 (DDAH1), |
| | E.154781 (C3orf19), E.156650 (KAT6B), E.158669 (AGPAT6), E.159363 (ATP13A2), |
| | E.163530 (DPPA2), E.164749 (HNF4G), E.165496 (RPL10L), E.165688 (PMPCA), |
| | E.165792 (METTL17), E.166598 (HSP90B1), E.168036 (CTNNB1), E.168746 (C20orf62), |
| | E.170381 (SEMA3E), E.171180 (OR2M4), E.171202 (TMEM126A), E.172594 |
| | (SMPDL3A), E.172653 (C17orf66), E.173540 (GMPPB), E.173585 (CCR9), E.173809 |
| | (TDRD12), E.175166 (PSMD2), E.177694 (NAALADL2), E.178026 (FAM211B; |
| | C22orf36), E.184363 (PKP3), E.187634 (SAMD11), E.203837 (PNLIPRP3), E.169122 |
| | (FAM110B), E.197969 (VPS13A), E.136068 (FLNB), E.075856 (SART3), E.081721 |
| | (DUSP12), E.102158 (MAGT1), E.102174 (PHEX), E.102316 (MAGED2), E.104723 |
| | (TUSC3), E.105939 (ZC3HAV1), E.108883 (EFTUD2), E.110328 (GALNTL4), E.111785 |
| | (RIC8B), E.113163 (COL4A3BP), E.115604 (IL18R1), E.117362 (APH1A), E.117480 |
| | (FAAH), E.124767 (GLO1), E.126267 (COX6B1), E.130175 (PRKCSH), E.135926 |
| | (TMBIM1), E.138674 (SEC31A), E.140451 (PIF1), E.143797 (MBOAT2), E.149646 |
| | (C20orf152), E.157064 (NMNAT2), E.160294 (MCM3AP), E.165084 (C8orf34), E.166946 |
| | (CCNDBP1), E.170348 (TMED10), E.170703 (TTLL6), E.175198 (PCCA), E.180287 |
| | (PLD5), E.183292 (MIR5096), E.187492 (CDHR4), E.188846 (RPL14), E.015479 |
| | (MATR3), E.100823 (APEX1), E.090615 (GOLGA3), E.086062 (B4GALT1), E.138385 |
| | (SSB), E.140265 (ZSCAN29), E.140932 (CMTM2), E.167969 (ECI1), E.135486 |
| | (HNRNPA1), E.137497 (NUMA1), E.181523 (SGSH), E.099956 (SMARCB1), E.049883 |
| | (PTCD2), E.082556 (OPRK1), E.090674 (MCOLN1), E.107164 (FUBP3), E.108582 (CPD), |
| | E.109758 (HGFAC), E.111605 (CPSF6), E.115239 (ASB3), E.121892 (PDS5A), E.125844 |
| | (RRBP1), E.130826 (DKC1), E.132481 (TRIM47), E.135390 (ATP5G2), E.136875 (PRPF4), |
| | E.138621 (PPCDC), E.145632 (PLK2), E.150051 (MKX), E.153140 (CETN3), E.154127 |
| | (UBASH3B), E.156194 (PPEF2), E.163825 (RTP3), E.164053 (ATRIP), E.164442 |
| | (CITED2), E.168066 (SF1), E.170430 (MGMT), E.175602 (CCDC85B), E.177752 (YIPF7), |
| | E.182512 (GLRX5), E.188186 (C7orf59), E.198721 (ECI2), E.204389 (HSPA1A), E.010256 |
| | (UQCRC1), E.076043 (REXO2), E.102362 (SYTL4), E.161939 (C17orf49), E.173039 |
| | (RELA), E.014216 (CAPN1), E.054938 (CHRDL2), E.065526 (SPEN), E.070501 (POLB), |
| | E.078808 (SDF4), E.083720 (OXCT1), E.100084 (HIRA), E.101246 (ARFRP1), E.102241 |
| | (HTATSF1), E.103591 (AAGAB), E.104626 (ERI1), E.105221 (AKT2), E.105402 (NAPA), |
| | E.105705 (SUGP1), E.106346 (USP42), E.108639 (SYNGR2), E.110107 (PRPF19), |
| | E.112473 (SLC39A7), E.113282 (CLINT1), E.115234 (SNX17), E.115561 (CHMP3), |
| | E.119906 (FAM178A), E.120733 (KDM3B), E.125375 (ATP5S), E.125798 (FOXA2), |
| | E.127415 (IDUA), E.129810 (SGOL1), E.132382 (MYBBP1A), E.133313 (CNDP2), |
| | E.134077 (THUMPD3), E.134248 (HBXIP), E.135597 (REPS1), E.137814 (HAUS2), |
| | E.138041 (SMEK2), E.140382 (HMG20A), E.143578 (CREB3L4), E.144224 (UBXN4), |
| | E.144306 (SCRN3), E.144741 (SLC25A26), E.145919 (BOD1), E.146281 (PM20D2), |
| | E.152359 (POC5), E.152409 (JMY), E.154889 (MPPE1), E.157551 (KCNJ15), E.157764 |
| | (BRAF), E.158987 (RAPGEF6), E.162069 (CCDC64B), E.162910 (MRPL55), E.163749 |
| | (CCDC158), E.164045 (CDC25A), E.164300 (SERINC5), E.165898 (ISCA2), E.167987 |
| | (VPS37C), E.168763 (CNNM3), E.170374 (SP7), E.171488 (LRRC8C), E.178381 |
| | (ZFAND2A), E.180998 (GPR137C), E.182318 (ZSCAN22), E.198040 (ZNF84), E.198216 |
| | (CACNA1E), E.198265 (HELZ), E.198586 (TLK1), E.203795 (FAM24A), E.204231 |
| | (RXRB), E.123992 (DNPEP), E.184634 (MED12), E.181885 (CLDN7), E.186660 (ZFP91), |
| | E.126777 (KTN1), E.080823 (MOK), E.101811 (CSTF2), E.124570 (SERPINB6), E.148835 |
| | (TAF5), E.158715 (SLC45A3), E.110955 (ATP5B), E.127022 (CANX), E.142208 (AKT1), |
| | E.128881 (TTBK2), E.147231 (CXorf57), E.006210 (CX3CL1), E.009830 (POMT2), |
| | E.011114 (BTBD7), E.065057 (NTHL1), E.068724 (TTC7A), E.073584 (SMARCE1), |
| | E.079785 (DDX1), E.084463 (WBP11), E.091140 (DLD), E.099821 (POLRMT), E.101126 |
| | (ADNP), E.104442 (ARMC1), E.105486 (LIG1), E.110921 (MVK), E.113441 (LNPEP), |
| | E.115758 (ODC1), E.116726 (PRAMEF12), E.119681 (LTBP2), E.136933 (RABEPK), |
| | E.137815 (RTF1), E.138095 (LRPPRC), E.138294 (MSMB), E.141873 (SLC39A3), |
| | E.142698 (C1orf94), E.143390 (RFX5), E.148488 (ST8SIA6), E.148737 (TCF7L2), |
| | E.151491 (EPS8), E.152422 (XRCC4), E.154832 (CXXC1), E.158321 (AUTS2), E.159147 |
| | (DONSON), E.160285 (LSS), E.160862 (AZGP1), E.160948 (VPS28), E.160972 |
| | (PPP1R16A), E.165934 (CPSF2), E.167604 (NFKBID), E.167766 (ZNF83), E.168803 |
| | (ADAL), E.169612 (FAM103A1), E.171262 (FAM98B), E.172893 (DHCR7), E.173889 |
| | (PHC3), E.176971 (FIBIN), E.177548 (RABEP2), E.179119 (SPTY2D1), E.184378 |
| | (ACTRT3), E.184508 (HDDC3), E.185043 (CIB1), E.186814 (ZSCAN30), E.186868 |
| | (MAPT), E.196812 (ZSCAN16), E.198563 (DDX39B), E.124529 (HIST1H4B), E.141002 |
| | (TCF25), E.174100 (MRPL45), E.109814 (UGDH), E.138756 (BMP2K), E.065457 |
| | (ADAT1), E.105948 (TTC26), E.109184 (DCUN1D4), E.125257 (ABCC4), E.126062 |
| | (TMEM115), E.142515 (KLK3), E.144381 (HSPD1), E.166710 (B2M), E.198824 |
| | (CHAMP1), E.078902 (TOLLIP), E.099331 (MYO9B), E.102710 (FAM48A), E.107485 |
| | (GATA3), E.120948 (TARDBP), E.187764 (SEMA4D), E.103855 (CD276), E.117751 |
| | (PPP1R8), E.173714 (WFIKKN2), E.172115 (CYCS), E.005882 (PDK2), E.007952 (NOX1), |
| | E.008118 (CAMK1G), E.012061 (ERCC1), E.015171 (ZMYND11), E.036257 (CUL3), |
| | E.057608 (GDI2), E.058729 (RIOK2), E.071246 (VASH1), E.073050 (XRCC1), E.073350 |
| | (LLGL2), E.079246 (XRCC5), E.085733 (CTTN), E.091542 (ALKBH5), E.091732 |
| | (ZC3HC1), E.092621 (PHGDH), E.099899 (TRMT2A), E.099917 (MED15), E.101439 |
| | (CST3), E.103479 (RBL2), E.104611 (SH2D4A), E.105281 (SLC1A5), E.106392 |
| | (C1GALT1), E.107104 (KANK1), E.107798 (LIPA), E.108296 (CWC25), E.109572 |
| | (CLCN3), E.112110 (MRPL18), E.113790 (EHHADH), E.115648 (MLPH), E.117308 |
| | (GALE), E.117335 (CD46), E.118513 (MYB), E.118640 (VAMP8), E.119321 (FKBP15), |
| | E.122705 (CLTA), E.123983 (ACSL3), E.124232 (RBPJL), E.125901 (MRPS26), E.127399 |
| | (LRRC61), E.127554 (GFER), E.128708 (HAT1), E.129355 (CDKN2D), E.130340 (SNX9), |
| | E.130935 (NOL11), E.131771 (PPP1R1B), E.133863 (TEX15), E.134207 (SYT6), E.136935 |
| | (GOLGA1), E.141425 (RPRD1A), E.143374 (TARS2), E.143771 (CNIH4), E.146966 |
| | (DENND2A), E.148672 (GLUD1), E.150593 (PDCD4), E.153936 (HS2ST1), E.154099 |
| | (DNAAF1), E.156006 (NAT2), E.156282 (CLDN17), E.158545 (ZC3H18), E.158604 |
| | (TMED4), E.158813 (EDA), E.159184 (HOXB13), E.161267 (BDH1), E.163492 |
| | (CCDC141), E.163629 (PTPN13), E.164163 (ABCE1), E.164520 (RAET1E), E.165138 |
| | (ANKS6), E.165923 (AGBL2), E.166484 (MAPK7), E.166747 (AP1G1), E.166971 |
| | (AKTIP), E.167744 (NTF4), E.168071 (CCDC88B), E.169087 (HSPBAP1), E.170396 |
| | (ZNF804A), E.170445 (HARS), E.170632 (ARMC10), E.170743 (SYT9), E.171428 |
| | (NAT1), E.172346 (CSDC2), E.173805 (HAP1), E.175175 (PPM1E), E.175203 (DCTN2), |
| | E.177542 (SLC25A22), E.177679 (SRRM3), E.178828 (RNF186), E.182013 (PNMAL1), |
| | E.182054 (IDH2), E.182890 (GLUD2), E.184156 (KCNQ3), E.184697 (CLDN6), E.184735 |
| | (DDX53), E.184840 (TMED9), E.185219 (ZNF445), E.186198 (SLC51B), E.186205 |
| | (MOSC1; MARC1), E.189143 (CLDN4), E.196700 (ZNF512B), E.196743 (GM2A), |
| | E.198087 (CD2AP), E.198951 (NAGA), E.204406 (MBD5), E.002330 (BAD), E.105404 |
| | (RABAC1), E.114127 (XRN1), E.117713 (ARID1A), E.123143 (PKN1), E.130764 |
| | (LRRC47), E.131773 (KHDRBS3), E.137806 (NDUFAF1), E.142864 (SERBP1), E.158747 |
| | (NBL1), E.175063 (UBE2C), E.178104 (PDE4DIP), E.186472 (PCLO), E.069956 (MAPK6), |
| | E.112941 (PAPD7), E.116604 (MEF2D), E.142875 (PRKACB), E.147133 (TAF1), |
| | E.157510 (AFAP1L1), E.006625 (GGCT), E.155980 (KIF5A), E.134444 (KIAA1468), |
| | E.107968 (MAP3K8), E.117592 (PRDX6), E.123154 (WDR83), E.135297 (MTO1), |
| | E.135829 (DHX9), E.149548 (CCDC15), E.152086 (TUBA3E), E.167553 (TUBA1C), |
| | E.169826 (CSGALNACT2), E.171121 (KCNMB3), E.198033 (TUBA3C), E.147724 |
| | (FAM135B), E.170854 (MINA), E.006695 (COX10), E.067369 (TP53BP1), E.089248 |
| | (ERP29), E.112096 (SOD2), E.138073 (PREB), E.146856 (AGBL3), E.159423 (ALDH4A1), |
| | E.171345 (KRT19), E.172345 (STARD5), E.111647 (UHRF1BP1L), E.117877 (CD3EAP), |
| | E.155714 (PDZD9), E.156603 (MED19), E.075886 (TUBA3D), E.167699 (GLOD4), |
| | E.121749 (TBC1D15), E.090861 (AARS), E.093010 (COMT), E.117676 (RPS6KA1), |
| | E.157502 (MUM1L1), E.159921 (GNE), E.169562 (GJB1), E.179776 (CDH5), E.071626 |
| | (DAZAP1), E.085224 (ATRX), E.116478 (HDAC1), E.117298 (ECE1), E.176171 (BNIP3), |
| | E.177425 (PAWR), E.179348 (GATA2), E.187840 (EIF4EBP1), E.033030 (ZCCHC8), |
| | E.049239 (H6PD), E.060688 (SNRNP40), E.075239 (ACAT1), E.095627 (TDRD1), |
| | E.109625 (CPZ), E.113719 (ERGIC1), E.126773 (C14orf135; PCNXL4), E.149218 |
| | (ENDOD1), E.162975 (KCNF1), E.183785 (TUBA8), E.198589 (LRBA), E.105379 (ETFB), |
| | E.011052 (NME2), E.011143 (MKS1), E.048544 (MRPS10), E.062485 (CS), E.114054 |
| | (PCCB), E.138587 (MNS1), E.155959 (VBP1), E.181222 (POLR2A), E.183723 (CMTM4), |
| | E.184661 (CDCA2), E.204316 (MRPL38), E.140694 (PARN), E.035141 (FAM136A), |
| | E.095485 (CWF19L1), E.115540 (MOB4), E.123595 (RAB9A), E.140678 (ITGAX), |
| | E.141258 (SGSM2), E.158941 (KIAA1967), E.169189 (NSMCE1), E.198431 (TXNRD1), |
| | E.016402 (IL20RA), E.112234 (FBXL4), E.125445 (MRPS7), E.128342 (LIF), E.164051 |
| | (CCDC51), E.175866 (BAIAP2), E.102780 (DGKH), E.203813 (HIST1H3H), E.198231 |
| | (DDX42), E.030582 (GRN), E.106049 (HIBADH), E.130810 (PPAN), E.132475 (H3F3B), |
| | E.158290 (CUL4B), E.166266 (CUL5), E.026559 (KCNG1), E.059122 (FLYWCH1), |
| | E.107897 (ACBD5), E.121068 (TBX2), E.125944 (HNRNPR), E.134308 (YWHAQ), |
| | E.137558 (PI15), E.137601 (NEK1), E.147548 (WHSC1L1), E.149182 (ARFGAP2), |
| | E.159658 (KIAA0494), E.165699 (TSC1), E.170927 (PKHD1), E.186575 (NF2), E.188021 |
| | (UBQLN2), E.167552 (TUBA1A), E.003756 (RBM5), E.134138 (MEIS2), E.008196 |
| | (TFAP2B), E.079313 (REXO1), E.089127 (OAS1), E.106078 (COBL), E.113645 (WWC1), |
| | E.116288 (PARK7), E.121940 (CLCC1), E.136280 (CCM2), E.141639 (MAPK4), E.147475 |
| | (ERLIN2), E.155660 (PDIA4), E.162298 (SYVN1), E.176978 (DPP7), E.176994 (SMCR8), |
| | E.178175 (ZNF366), E.196591 (HDAC2), E.127824 (TUBA4A), E.163932 (PRKCD), |
| | E.143375 (CGN), E.076864 (RAP1GAP), E.138772 (ANXA3), E.163041 (H3F3A), |
| | E.165813 (C10orf118), E.166337 (TAF10), E.178078 (STAP2), E.184007 (PTP4A2), |
| | E.167004 (PDIA3), E.039560 (RAI14), E.119636 (C14orf45), E.140374 (ETFA), E.143633 |
| | (C1orf131), E.144935 (TRPC1), E.156735 (BAG4), E.159348 (CYB5R1), E.170275 |
| | (CRTAP), E.172717 (FAM71D), E.172939 (OXSR1), E.176105 (YES1), E.078295 |
| | (ADCY2), E.119888 (EPCAM), E.141522 (ARHGDIA), E.184047 (DIABLO), E.109062 |
| | (SLC9A3R1), E.170037 (CNTROB), E.066557 (LRRC40), E.074964 (ARHGEF10L), |
| | E.078269 (SYNJ2), E.090013 (BLVRB), E.100142 (POLR2F), E.100399 (CHADL), |
| | E.104365 (IKBKB), E.111261 (MANSC1), E.111907 (TPD52L1), E.112578 (BYSL), |
| | E.121957 (GPSM2), E.122884 (P4HA1), E.124693 (HIST1H3B), E.126653 (NSRP1), |
| | E.130402 (ACTN4), E.138757 (G3BP2), E.150991 (UBC), E.164828 (SUN1), E.175216 |
| | (CKAP5), E.176155 (CCDC57), E.177459 (C8orf47), E.183856 (IQGAP3), E.185122 |
| | (HSF1), E.122952 (ZWINT), E.151093 (OXSM), E.067704 (IARS2), E.088899 (ProSAP- |
| | interacting protein 1), E.091483 (FH), E.114388 (NPRL2), E.114861 (FOXP1), E.135914 |
| | (HTR2B), E.197837 (HIST4H4), E.127720 (C12orf26; METTL25), E.123416 (TUBA1B), |
| | E.047410 (TPR), E.117748 (RPA2), E.133835 (HSD17B4), E.067248 (DHX29), E.121879 |
| | (PIK3CA), E.132589 (FLOT2), E.136750 (GAD2), E.160789 (LMNA), E.166329, E.170088 |
| | (TMEM192), E.175946 (KLHL38), E.178163 (ZNF518B), E.182217 (HIST2H4B), |
| | E.184470 (TXNRD2), E.110321 (EIF4G2), E.171861 (RNMTL1), E.065978 (YBX1), |
| | E.115738 (ID2), E.143294 (PRCC), E.158042 (MRPL17), E.169093 (ASMTL), E.090565 |
| | (RAB11FIP3), E.185591 (SP1), E.156304 (SCAF4), E.092978 (GPATCH2), E.100056 |
| | (DGCR14), E.100583 (SAMD15), E.105723 (GSK3A), E.107551 (RASSF4), E.107581 |
| | (EIF3A), E.107890 (ANKRD26), E.110104 (CCDC86), E.112584 (FAM120B), E.113580 |
| | (NR3C1), E.114491 (UMPS), E.137312 (FLOT1), E.137955 (RABGGTB), E.141994 |
| | (DUS3L), E.147044 (CASK), E.152818 (UTRN), E.180667 (YOD1), E.184916 (JAG2), |
| | E.196526 (AFAP1), E.198783 (ZNF830), E.108465 (CDK5RAP3), E.156515 (HK1), |
| | E.036448 (MYOM2), E.061918 (GUCY1B3), E.070785 (EIF2B3), E.116044 (NFE2L2), |
| | E.128311 (TST), E.131473 (ACLY), E.132716 (DCAF8), E.138363 (ATIC), E.166596 |
| | (WDR16), E.170027 (YWHAG), E.174021 (GNG5), E.203879 (GDI1), E.160049 (DFFA), |
| | E.010810 (FYN), E.051596 (THOC3), E.006453 (BAI1-associated protein 2-like 1), |
| | E.126945 (HNRNPH2), E.165695 (AK8), E.069869 (NEDD4), E.111801 (BTN3A3), |
| | E.112232 (KHDRBS2), E.128626 (MRPS12), E.129636 (ITFG1), E.137948 (BRDT), |
| | E.147257 (GPC3), E.155380 (SLC16A1), E.159692 (CTBP1), E.166833 (NAV2), E.172466 |
| | (ZNF24), E.175110 (MRPS22), E.176102 (CSTF3), E.179388 (EGR3), E.185359 (HGS), |
| | E.198001 (IRAK4), E.100603 (SNW1), E.162641 (AKNAD1), E.069712 (KIAA1107), |
| | E.073756 (PTGS2), E.077522 (ACTN2), E.101639 (CEP192), E.106633 (GCK), E.115241 |
| | (PPM1G), E.116649 (SRM), E.120370 (GORAB), E.124143 (ARHGAP40), E.127948 |
| | (POR), E.129315 (CCNT1), E.132646 (PCNA), E.135740 (SLC9A5), E.151726 (ACSL1), |
| | E.154380 (ENAH), E.157103 (SLC6A1), E.163930 (BAP1), E.164488 (DACT2), E.164754 |
| | (RAD21), E.175220 (ARHGAP1), E.180318 (ALX1), E.181234 (TMEM132C), E.197081 |
| | (IGF2R), E.092871 (RFFL), E.163644 (PPM1K), E.171723 (GPHN), E.108953 (YWHAE), |
| | E.072110 (ACTN1), E.077097 (TOP2B), E.090889 (KIF4A), E.114331 (ACAP2), E.114867 |
| | (EIF4G1), E.117593 (DARS2), E.118523 (CTGF), E.120915 (EPHX2), E.134759 (ELP2), |
| | E.138061 (CYP1B1), E.140743 (CDR2), E.151247 (EIF4E), E.152942 (RAD17), E.160685 |
| | (ZBTB7B), E.163923 (RPL39L), E.167642 (SPINT2), E.167996 (FTH1), E.185736 |
| | (ADARB2), E.198841 (KTI12), E.185860 (C1orf110), E.160226 (C21orf2), E.070814 |
| | (TCOF1), E.124749 (COL21A1), E.154639 (CXADR), E.065485 (PDIA5), E.023909 |
| | (GCLM), E.100714 (MTHFD1), E.108387 (SEPT4), E.160867 (FGFR4), E.134684 (YARS), |
| | E.123080 (CDKN2C), E.065548 (ZC3H15), E.116455 (WDR77), E.117448 (AKR1A1), |
| | E.100393 (EP300), E.138160 (KIF11), E.166263 (STXBP4), E.173473 (SMARCC1), |
| | E.124942 (AHNAK), E.174842 (GLMN), E.180198 (RCC1), E.185499 (MUC1), E.143947 |
| | (RPS27A), E.170315 (UBB), E.003402 (CFLAR), E.137055 (PLAA), E.142606 (MMEL1), |
| | E.147697 (GSDMC), E.163110 (PDLIM5), E.135842 (FAM129A), E.160691 (SHC1), |
| | E.197157 (SND1), E.029725 (RABEP1), E.127946 (HIP1), E.001036 (FUCA2), E.109846 |
| | (CRYAB), E.183831 (ANKRD45), E.189283 (FHIT), E.092820 (EZR), E.104067 (TJP1), |
| | E.120159 (C9orf82; CAAP1), E.154864 (PIEZO2), E.196975 (ANXA4), E.105220 (GPI), |
| | E.127914 (AKAP9), E.135870 (RC3H1), E.026508 (CD44), E.089154 (GCN1L1), E.100311 |
| | (PDGFB), E.119383 (PPP2R4), E.075624 (ACTB), E.177409 (SAMD9L), E.177731 (FLII), |
| | E.015676 (NUDCD3), E.146457 (WTAP), E.178950 (GAK), E.167110 (GOLGA2) |
| Prostate vesicle | LAMP2, ACPP, CTNNA1, HEBP2, ISOC2, HNRNPC, HNRNPM, TOMM22, TOM1, |
| | ACO2, KRT18, HSPA9, LMNB1, SPR, PPL, ALDH6A1, HNRNPA2B1, ATXN1, |
| | SMARCA4, ECHS1, PAICS, ILF3, PSME3, COX5B, RAB1A, SCARB2, HADH, ESD, |
| | SORD, ILF2, CALM2, ATP5A1, TGOLN2, ANGPTL4, ALCAM, KRT2, PC, NPM1, |
| | C1orf116, GPC6, ALDH1A3, HIST1H1C, XRCC6, HNRNPAB, PSAP, CDH1, SCAMP2, |
| | VASP, CD9, ATP1B3, HSD17B10, APAF1, EIF2C2, RAB5A, CFL2, FARSA, XPNPEP3, |
| | ENTPD4, APLP2, NUCB1, RAB3D, VEGFA, HPS3, TSNAXIP1, HNRNPL, PSMB7, |
| | GNA12, NONO, FOLH1, PRKAR2A, PHB, HIST3H3, MAP7, VCP, U2AF2, FUS, FKBP5, |
| | NDRG1, ATP1A3, NCL, RPL36, KRT8, C1GALT1C1, FASN, PTBP1, TXNDC16, |
| | DNAJC5, SLC37A2, HNRNPK, VDAC2, PRDX2, TALDO1, USP14, PSMD7, HSPE1, |
| | DNAJB1, YWHAZ, RAB3B, CORO1B, MDH2, HIST1H3A, LAMP1, STC2, DSTN, |
| | SLC20A2, ENPP4, WIZ, HSP90AB1, IDH3B, ECH1, C1QBP, SET, TNFSF18, ITGB7, |
| | SPOCK1, EIF4A2, CCT3, CLDN3, EEF2, LRRC57, RUVBL2, CLDN5, APPL2, TM9SF2, |
| | EIF4A3, DBI, DBF4B, SVIP, CD151, ALOX5, SLC9A3R2, RAB27B, DLG1, ARCN1, |
| | CHCHD3, RAB5B, RPS25, RPL10, DDAH1, HSP90B1, CTNNB1, PSMD2, PKP3, FLNB, |
| | EFTUD2, GLO1, PRKCSH, TMBIM1, SEC31A, TMED10, RPL14, MATR3, APEX1, |
| | B4GALT1, HNRNPA1, CPD, HSPA1A, CAPN1, CHRDL2, SPEN, SDF4, NAPA, |
| | SYNGR2, CHMP3, CNDP2, CCDC64B, SERINC5, VPS37C, DNPEP, CLDN7, KTN1, |
| | SERPINB6, ATP5B, CANX, AKT1, TTBK2, DDX1, DLD, LNPEP, LTBP2, LRPPRC, |
| | EPS8, AZGP1, VPS28, DHCR7, CIB1, DDX39B, HIST1H4B, UGDH, HSPD1, B2M, |
| | TOLLIP, CD276, CYCS, CUL3, GDI2, LLGL2, XRCC5, CTTN, PHGDH, CST3, RBL2, |
| | SLC1A5, CD46, VAMP8, CLTA, ACSL3, MRPS26, SNX9, GLUD1, TMED4, PTPN13, |
| | AP1G1, SYT9, DCTN2, IDH2, GLUD2, TMED9, CLDN4, GM2A, CD2AP, MBD5, |
| | SERBP1, NBL1, PRKACB, GGCT, PRDX6, DHX9, TUBA3E, TUBA1C, TUBA3C, |
| | ERP29, SOD2, KRT19, TUBA3D, AARS, COMT, MUM1L1, CDH5, ECE1, ACAT1, |
| | ENDOD1, TUBA8, ETFB, NME2, CS, VBP1, RAB9A, TXNRD1, LIF, BAIAP2, |
| | HIST1H3H, GRN, HIBADH, H3F3B, CUL4B, HNRNPR, YWHAQ, PKHD1, TUBA1A, |
| | PARK7, ERLIN2, PDIA4, TUBA4A, PRKCD, ANXA3, H3F3A, PTP4A2, PDIA3, ETFA, |
| | CYB5R1, CRTAP, OXSR1, YES1, EPCAM, ARHGDIA, DIABLO, SLC9A3R1, BLVRB, |
| | P4HA1, HIST1H3B, ACTN4, UBC, FH, HIST4H4, TUBA1B, HSD17B4, PIK3CA, FLOT2, |
| | LMNA, TMEM192, HIST2H4B, YBX1, EIF3A, FLOT1, UTRN, HK1, ACLY, ATIC, |
| | YWHAG, GNG5, GDI1, HNRNPH2, NEDD4, BTN3A3, SLC16A1, HGS, ACTN2, SRM, |
| | PCNA, ACSL1, RAD21, ARHGAP1, IGF2R, YWHAE, ACTN1, EIF4G1, EPHX2, EIF4E, |
| | FTH1, CXADR, MTHFD1, AKR1A1, STXBP4, AHNAK, MUC1, RPS27A, UBB, |
| | PDLIM5, FAM129A, SND1, FUCA2, CRYAB, EZR, TJP1, ANXA4, GPI, AKAP9, CD44, |
| | GCN1L1, ACTB, FLII, NUDCD3 |
| Prostate Cancer | EGFR, GLUD2, ANXA3, APLP2, BclG, Cofilin 2/cfL2, DCTN-50/DCTN2, DDAH1, |
| vesicles | ESD, FARSLA, GITRL, PRKCSH, SLC20A2, Synaptogyrin 2/SYNGR2, TM9SF2, |
| | Calnexin, TOMM22, NDRG1, RPL10, RPL14, USP14, VDAC2, LLGL2, CD63, CD81, |
| | uPAR/CD87, ADAM 9, BDKRB2, CCR5, CCT2 (TCP1-beta), PSMA, PSMA1, HSPB1, |
| | VAMP8, Rab1A, B4GALT1, Aspartyl Aminopeptidase/Dnpep, ATPase Na+/K+ beta |
| | 3/ATP1B3, BDNF, ATPB, beta 2 Microglobulin, Calmodulin 2/CALM2, CD9, XRCC5/ |
| | Ku80, SMARCA4, TOM1, Cytochrome C, Hsp10/HSPE1, COX2/PTGS2, Claudin 4/ |
| | CLDN4, Cytokeratin 8, Cortactin/CTTN, DBF4B/DRF1, ECH1, ECHS1, GOLPH2, ETS1, |
| | DIP13B/appl2, EZH2/KMT6, GSTP1, hK2/Kif2a, IQGAP1, KLK13, Lamp-2, GM2A, |
| | Hsp40/DNAJB1, HADH/HADHSC, Hsp90B, Nucleophosmin, p130/RBL2, PHGDH, |
| | RAB3B, ANXA1, PSMD7, PTBP1, Rab5a, SCARB2, Stanniocalcin 2/STC2, TGN46/ |
| | TGOLN2, TSNAXIP1, ANXA2, CD46, KLK14, IL1alpha, hnRNP C1 + C2, hnRNP A1, |
| | hnRNP A2B1, Claudin 5, CORO1B, Integrin beta 7, CD41, CD49d, CDH2, COX5b, IDH2, |
| | ME1, PhIP, ALDOA, EDNRB/EDN3, MTA1, NKX3-1, TMPRSS2, CD10, CD24, CDH1, |
| | ADAM10, B7H3, CD276, CHRDL2, SPOCK1, VEGFA, BCHE, CD151, CD166/ALCAM, |
| | CSE1L, GPC6, CXCR3, GAL3, GDF15, IGFBP-2, HGF, KLK12, ITGAL, KLK7, KLK9, |
| | MMP 2, MMP 25, MMP10, TNFRI, Notch1, PAP - same as ACPP, PTPN13/PTPL1, |
| | seprase/FAP, TNFR1, TWEAK, VEGFR2, E-Cadherin, Hsp60, CLDN3 - Claudin3, KLK6, |
| | KLK8, EDIL3 (del-1), APE1, MMP 1, MMP3, nAnS, PSP94/MSP/IGBF, PSAP, RPL19, |
| | SET, TGFB, TGM2, TIMP-1, TNFRII, MDH2, PKP1, Cystatin C, Trop2/TACSTD2, CCR2/ |
| | CD192, hnRNP M1-M4, CDKN1A, CGA, Cytokeratin 18, EpoR, GGPS1, FTL (light and |
| | heavy), GM-CSF, HSP90AA1, IDH3B, MKI67/Ki67, LTBP2, KLK1, KLK4, KLK5, LDH- |
| | A, Nav1.7/SCN9A, NRP1/CD304, PIP3/BPNT1, PKP3, CgA, PRDX2, SRVN, ATPase |
| | Na+/K+ alpha 3/ATP1A3, SLC3A2/CD98, U2AF2, TLR4 (CD284), TMPRSS1, TNFα, |
| | uPA, GloI, ALIX, PKM2, FABP5, CAV1, TLR9/CD289, ANXA4, PLEKHC1/Kindlin-2, |
| | CD71/TRFR, MBD5, SPEN/RBM15, LGALS8, SLC9A3R2, ENTPD4, ANGPTL4, p97/ |
| | VCP, TBX5, PTEN, Prohibitin, LSP1, HOXB13, DDX1, AKT1, ARF6, EZR, H3F3A, CIB1, |
| | Ku70 (XRCC6), KLK11, TMBIM6, SYT9, APAF1, CLDN7, MATR3, CD90/THY1, Tollip, |
| | NOTCH4, 14-3-3 zeta/beta, ATP5A1, DLG1, GRP94, FKBP5/FKBP51, LAMP1, |
| | LGALS3BP, GDI2, HSPA1A, NCL, KLK15, Cytokeratin basic, EDN-3, AGR2, KLK10, |
| | BRG1, FUS, Histone H4, hnRNP L, Catenin Alpha 1, hnRNP K (F45)*, MMP7*, DBI*, beta |
| | catenin, CTH, CTNND2, Ataxin 1, Proteasome 20S beta 7, ADE2, EZH2, GSTP1, Lamin |
| | B1, Coatomer Subunit Delta, ERAB, Mortalin, PKM2, IGFBP-3, CTNND1/delta 1-catenin/ |
| | p120-catenin, PKA R2, NONO, Sorbitol Dehydrogenase, Aconitase 2, VASP, Lipoamide |
| | Dehydrogenase, AP1G1, GOLPH2, ALDH6A1, AZGP1, Ago2, CNDP2, Nucleobindin-1, |
| | SerpinB6, RUVBL2, Proteasome 19S 10B, SH3PX1, SPR, Destrin, MDM4, FLNB, FASN, |
| | PSME |
| Prostate Cancer | 14-3-3 zeta/beta, Aconitase 2, ADAM 9, ADAM10, ADE2, AFM, Ago2, AGR2, AKT1, |
| vesicles | ALDH1A3, ALDH6A1, ALDOA, ALIX, ANGPTL4, ANXA1, ANXA2, ANXA3, ANXA3, |
| | ANXA4, AP1G1, APAF1, APE1, APLP2, APLP2, ARF6, Aspartyl Aminopeptidase/Dnpep, |
| | Ataxin 1, ATP5A1, ATPase Na+/K+ alpha 3/ATP1A3, ATPase Na+/K+ beta 3/ATP1B3, |
| | ATPase Na+/K+ beta 3/ATP1B3, ATPB, AZGP1, B4GALT1, B7H3, BCHE, BclG, |
| | BDKRB2, BDNF, BDNF, beta 2 Microglobulin, beta catenin, BRG1, CALM2, Calmodulin 2/ |
| | CALM2, Calnexin, Calpain 1, Catenin Alpha 1, CAV1, CCR2/CD192, CCR5, CCT2 |
| | (TCP1-beta), CD10, CD151, CD166/ALCAM, CD24, CD276, CD41, CD46, CD49d, CD63, |
| | CD71/TRFR, CD81, CD9, CD9, CD90/THY1, CDH1, CDH2, CDKN1A, CGA, CgA, |
| | CHRDL2, CIB1, CIB1, Claudin 4/CLDN4, Claudin 5, CLDN3, CLDN3 - Claudin3, CLDN4, |
| | CLDN7, CNDP2, Coatomer Subunit Delta, Cofilin 2/cfL2, CORO1B, Cortactin/CTTN, |
| | COX2/PTGS2, COX5b, CSE1L, CTH, CTNND1/delta 1-catenin/p120-catenin, |
| | CTNND2, CXCR3, CYCS, Cystatin C, Cytochrome C, Cytokeratin 18, Cytokeratin 8, |
| | Cytokeratin basic, DBF4B/DRF1, DBI*, DCTN-50/DCTN2, DDAH1, DDAH1, DDX1, |
| | Destrin, DIP13B/appl2, DIP13B/appl2, DLG1, Dnpep, E-Cadherin, ECH1, ECHS1, |
| | ECHS1, EDIL3 (del-1), EDN-3, EDNRB/EDN3, EGFR, EIF4A3, ENTPD4, EpoR, EpoR, |
| | ERAB, ESD, ESD, ETS1, ETS1, ETS-2, EZH2, EZH2/KMT6, EZR, FABP5, FARSLA, |
| | FASN, FKBP5/FKBP51, FLNB, FTL (light and heavy), FUS, GAL3, gamma-catenin, |
| | GDF15, GDI2, GGPS1, GGPS1, GITRL, GloI, GLUD2, GM2A, GM-CSF, |
| | GOLM1/GOLPH2 Mab; clone 3B10, GOLPH2, GOLPH2, GPC6, GRP94, GSTP1, GSTP1, |
| | H3F3A, HADH/HADHSC, HGF, HIST1H3A, Histone H4, hK2/Kif2a, hnRNP A1, hnRNP |
| | A2B1, hnRNP C1 + C2, hnRNP K (F45)*, hnRNP L, hnRNP M1-M4, HOXB13, Hsp10/ |
| | HSPE1, Hsp40/DNAJB1, Hsp60, HSP90AA1, Hsp90B, HSPA1A, HSPB1, IDH2, IDH3B, |
| | IDH3B, IGFBP-2, IGFBP-3, IgG1, IgG2A, IgG2B, IL1alpha, IL1alpha, Integrin beta 7, |
| | IQGAP1, ITGAL, KLHL12/C3IP1, KLK1, KLK10, KLK11, KLK12, KLK13, KLK14, |
| | KLK15, KLK4, KLK5, KLK6, KLK7, KLK8, KLK9, Ku70 (XRCC6), Lamin B1, LAMP1, |
| | Lamp-2, LDH-A, LGALS3BP, LGALS8, Lipoamide Dehydrogenase, LLGL2, LSP1, LSP1, |
| | LTBP2, MATR3, MBD5, MDH2, MDM4, ME1, MKI67/Ki67, MMP 1, MMP 2, MMP 25, |
| | MMP10, MMP-14/MT1-MMP, MMP3, MMP7*, Mortalin, MTA1, nAnS, nAnS, |
| | Nav1.7/SCN9A, NCL, NDRG1, NKX3-1, NONO, Notch1, NOTCH4, NRP1/CD304, |
| | Nucleobindin-1, Nucleophosmin, p130/RBL2, p97/VCP, PAP - same as ACPP, PHGDH, |
| | PhIP, PIP3/BPNT1, PKA R2, PKM2, PKM2, PKP1, PKP3, PLEKHC1/Kindlin-2, PRDX2, |
| | PRKCSH, Prohibitin, Proteasome 19S 10B, Proteasome 20S beta 7, PSAP, PSMA, PSMA1, |
| | PSMA1, PSMD7, PSMD7, PSME3, PSP94/MSP/IGBF, PTBP1, PTEN, PTPN13/PTPL1, |
| | Rab1A, RAB3B, Rab5a, Rad51b, RPL10, RPL10, RPL14, RPL14, RPL19, RUVBL2, |
| | SCARB2, seprase/FAP, SerpinB6, SET, SH3PX1, SLC20A2, SLC3A2/CD98, SLC9A3R2, |
| | SMARCA4, Sorbitol Dehydrogenase, SPEN/RBM15, SPOCK1, SPR, SRVN, Stanniocalcin |
| | 2/STC2, STEAP1, Synaptogyrin 2/SYNGR2, Syndecan, SYNGR2, SYT9, TAF1B/ |
| | GRHL1, TBX5, TGFB, TGM2, TGN46/TGOLN2, TIMP-1, TLR3, TLR4 (CD284), TLR9/ |
| | CD289, TM9SF2, TMBIM6, TMPRSS1, TMPRSS2, TNFR1, TNFRI, TNFRII, TNFSF18/ |
| | GITRL, TNFα, TNFα, Tollip, TOM1, TOMM22, Trop2/TACSTD2, TSNAXIP1, TWEAK, |
| | U2AF2, uPA, uPAR/CD87, USP14, USP14, VAMP8, VASP, VDAC2, VEGFA, |
| | VEGFR1/FLT1, VEGFR2, VPS28, XRCC5/Ku80, XRCC5/Ku80 |
| Prostate Vesicles/ | EpCAM/TROP-1, HSA, Fibrinogen, GAPDH, Cholesterol Oxidase, MMP7, Complement |
| General Vesicles | Factor D/Adipsin, E-Cadherin, Transferrin Antibody, eNOS, IgM, CD9, Apolipoprotein B |
| | (Apo B), Ep-CAM, TBG, Kallekerin 3, IgA, IgG, Annexin V, IgG, Pyruvate Carboxylase, |
| | trypsin, AFP, TNF RI/TNFRSF1A, Aptamer CAR023, Aptamer CAR024, Aptamer CAR025, |
| | Aptamer CAR026 |
| Ribonucleoprotein | GW182, Ago2, miR-let-7a, miR-16, miR-22, miR-148a, miR-451, miR-92a, CD9, CD63, |
| complexes & | CD81 |
| vesicles | |
| Prostate Cancer | PCSA, Muc2, Adam10 |
| vesicles | |
| Prostate Cancer | Alkaline Phosphatase (AP), CD63, MyoD1, Neuron Specific Enolase, MAP1B, CNPase, |
| vesicles | Prohibitin, CD45RO, Heat Shock Protein 27, Collagen II, Laminin B1/b1, Gai1, CDw75, bcl- |
| | XL, Laminin-s, Ferritin, CD21, ADP-ribosylation Factor (ARF-6) |
| Prostate Cancer | CD56/NCAM-1, Heat Shock Protein 27/hsp27, CD45RO, MAP1B, MyoD1, |
| vesicles | CD45/T200/LCA, CD3zeta, Laminin-s, bcl-XL, Rad18, Gai1, Thymidylate Synthase, |
| | Alkaline Phosphatase (AP), CD63, MMP-16/MT3-MMP, Cyclin C, Neuron Specific |
| | Enolase, SIRP a1, Laminin B1/b1, Amyloid Beta (APP), SODD (Silencer of Death Domain), |
| | CDC37, Gab-1, E2F-2, CD6, Mast Cell Chymase, Gamma Glutamylcysteine Synthetase |
| | (GCS) |
| Prostate Cancer | EpCAM, MMP7, PCSA, BCNP, ADAM10, KLK2, SPDEF, CD81, MFGE8, IL-8 |
| vesicles | |
| Prostate Cancer | EpCAM, KLK2, PBP, SPDEF, SSX2, SSX4 |
| vesicles | |
| Prostate Cancer | ADAM-10, BCNP, CD9, EGFR, EpCam, IL1B, KLK2, MMP7, p53, PBP, PCSA, |
| vesicles | SERPINB3, SPDEF, SSX2, SSX4 |
| Androgen Receptor | GTF2F1, CTNNB1, PTEN, APPL1, GAPDH, CDC37, PNRC1, AES, UXT, RAN, PA2G4, |
| (AR) pathway | JUN, BAG1, UBE2I, HDAC1, COX5B, NCOR2, STUB1, HIPK3, PXN, NCOA4 |
| members in cMVs | |
| EGFR1 pathway | RALBP1, SH3BGRL, RBBP7, REPS1, SNRPD2, CEBPB, APPL1, MAP3K3, EEF1A1, |
| members in cMVs | GRB2, RAC1, SNCA, MAP2K3, CEBPA, CDC42, SH3KBP1, CBL, PTPN6, YWHAB, |
| | FOXO1, JAK1, KRT8, RALGDS, SMAD2, VAV1, NDUFA13, PRKCB1, MYC, JUN, |
| | RFXANK, HDAC1, HIST3H3, PEBP1, PXN, TNIP1, PKN2 |
| TNF-alpha | BCL3, SMARCE1, RPS11, CDC37, RPL6, RPL8, PAPOLA, PSMC1, CASP3, AKT2, |
| pathway members | MAP3K7IP2, POLR2L, TRADD, SMARCA4, HIST3H3, GNB2L1, PSMD1, PEBP1, |
| in cMVs | HSPB1, TNIP1, RPS13, ZFAND5, YWHAQ, COMMD1, COPS3, POLR1D, SMARCC2, |
| | MAP3K3, BIRC3, UBE2D2, HDAC2, CASP8, MCMI, PSMD7, YWHAG, NFKBIA, |
| | CAST, YWHAB, G3BP2, PSMD13, FBL, RELB, YWHAZ, SKP1, UBE2D3, PDCD2, |
| | HSP90AA1, HDAC1, KPNA2, RPL30, GTF2I, PFDN2 |
| Colorectal cancer | CD9, EGFR, NGAL, CD81, STEAP, CD24, A33, CD66E, EPHA2, Ferritin, GPR30, |
| | GPR110, MMP9, OPN, p53, TMEM211, TROP2, TGM2, TIMP, EGFR, DR3, UNC93A, |
| | MUC17, EpCAM, MUC1, MUC2, TSG101, CD63, B7H3 |
| Colorectal cancer | DR3, STEAP, epha2, TMEM211, unc93A, A33, CD24, NGAL, EpCam, MUC17, TROP2, |
| | TETS |
| Colorectal cancer | A33, AFP, ALIX, ALX4, ANCA, APC, ASCA, AURKA, AURKB, B7H3, BANK1, BCNP, |
| | BDNF, CA-19-9, CCSA-2, CCSA-3&4, CD10, CD24, CD44, CD63, CD66 CEA, CD66e |
| | CEA, CD81, CD9, CDA, C-Erb2, CRMP-2, CRP, CRTN, CXCL12, CYFRA21-1, DcR3, |
| | DLL4, DR3, EGFR, Epcam, EphA2, FASL, FRT, GAL3, GDF15, GPCR (GPR110), GPR30, |
| | GRO-1, HBD 1, HBD2, HNP1-3, IL-1B, IL8, IMP3, L1CAM, LAMN, MACC-1, |
| | MGC20553, MCP-1, M-CSF, MIC1, MIF, MMP7, MMP9, MS4A1, MUC1, MUC17, |
| | MUC2, Ncam, NGAL, NNMT, OPN, p53, PCSA, PDGFRB, PRL, PSMA, PSME3, Reg IV, |
| | SCRN1, Sept-9, SPARC, SPON2, SPR, SRVN, TFF3, TGM2, TIMP-1, TMEM211, TNF- |
| | alpha, TPA, TPS, Trail-R2, Trail-R4, TrKB, TROP2, Tsg 101, TWEAK, UNC93A, VEGFA |
| Colorectal cancer | miR 92, miR 21, miR 9, miR 491 |
| Colorectal cancer | miR-127-3p, miR-92a, miR-486-3p, miR-378 |
| Colorectal cancer | TMEM211, MUC1, CD24 and/or GPR110 (GPCR 110) |
| Colorectal cancer | hsa-miR-376c, hsa-miR-215, hsa-miR-652, hsa-miR-582-5p, hsa-miR-324-5p, hsa-miR- |
| | 1296, hsa-miR-28-5p, hsa-miR-190, hsa-miR-590-5p, hsa-miR-202, hsa-miR-195 |
| Colorectal cancer | A26C1A, A26C1B, A2M, ACAA2, ACE, ACOT7, ACP1, ACTA1, ACTA2, ACTB, |
| vesicle markers | ACTBL2, ACTBL3, ACTC1, ACTG1, ACTG2, ACTN1, ACTN2, ACTN4, ACTR3, |
| | ADAM10, ADSL, AGR2, AGR3, AGRN, AHCY, AHNAK, AKR1B10, ALB, ALDH16A1, |
| | ALDH1A1, ALDOA, ANXA1, ANXA11, ANXA2, ANXA2P2, ANXA4, ANXA5, ANXA6, |
| | AP2A1, AP2A2, APOA1, ARF1, ARF3, ARF4, ARF5, ARF6, ARHGDIA, ARPC3, |
| | ARPC5L, ARRDC1, ARVCF, ASCC3L1, ASNS, ATP1A1, ATP1A2, ATP1A3, ATP1B1, |
| | ATP4A, ATP5A1, ATP5B, ATP5I, ATP5L, ATP5O, ATP6AP2, B2M, BAIAP2, |
| | BAIAP2L1, BRI3BP, BSG, BUB3, C1orf58, C5orf32, CAD, CALM1, CALM2, CALM3, |
| | CAND1, CANX, CAPZA1, CBR1, CBR3, CCT2, CCT3, CCT4, CCT5, CCT6A, CCT7, |
| | CCT8, CD44, CD46, CD55, CD59, CD63, CD81, CD82, CD9, CDC42, CDH1, CDH17, |
| | CEACAM5, CFL1, CFL2, CHMP1A, CHMP2A, CHMP4B, CKB, CLDN3, CLDN4, |
| | CLDN7, CLIC1, CLIC4, CLSTN1, CLTC, CLTCL1, CLU, COL12A1, COPB1, COPB2, |
| | CORO1C, COX4I1, COX5B, CRYZ, CSPG4, CSRP1, CST3, CTNNA1, CTNNB1, |
| | CTNND1, CTTN, CYFIP1, DCD, DERA, DIP2A, DIP2B, DIP2C, DMBT1, DPEP1, DPP4, |
| | DYNC1H1, EDIL3, EEF1A1, EEF1A2, EEF1AL3, EEF1G, EEF2, EFNB1, EGFR, EHD1, |
| | EHD4, EIF3EIP, EIF3I, EIF4A1, EIF4A2, ENO1, ENO2, ENO3, EPHA2, EPHA5, EPHB1, |
| | EPHB2, EPHB3, EPHB4, EPPK1, ESD, EZR, F11R, F5, F7, FAM125A, FAM125B, |
| | FAM129B, FASLG, FASN, FAT, FCGBP, FER1L3, FKBP1A, FLNA, FLNB, FLOT1, |
| | FLOT2, G6PD, GAPDH, GARS, GCN1L1, GDI2, GK, GMDS, GNA13, GNAI2, GNAI3, |
| | GNAS, GNB1, GNB2, GNB2L1, GNB3, GNB4, GNG12, GOLGA7, GPA33, GPI, |
| | GPRC5A, GSN, GSTP1, H2AFJ, HADHA, hCG_1757335, HEPH, HIST1H2AB, |
| | HIST1H2AE, HIST1H2AJ, HIST1H2AK, HIST1H4A, HIST1H4B, HIST1H4C, HIST1H4D, |
| | HIST1H4E, HIST1H4F, HIST1H4H, HIST1H4I, HIST1H4J, HIST1H4K, HIST1H4L, |
| | HIST2H2AC, HIST2H4A, HIST2H4B, HIST3H2A, HIST4H4, HLA-A, HLA-A29.1, HLA- |
| | B, HLA-C, HLA-E, HLA-H, HNRNPA2B1, HNRNPH2, HPCAL1, HRAS, HSD17B4, |
| | HSP90AA1, HSP90AA2, HSP90AA4P, HSP90AB1, HSP90AB2P, HSP90AB3P, HSP90B1, |
| | HSPA1A, HSPA1B, HSPA1L, HSPA2, HSPA4, HSPA5, HSPA6, HSPA7, HSPA8, HSPA9, |
| | HSPD1, HSPE1, HSPG2, HYOU1, IDH1, IFITM1, IFITM2, IFITM3, IGH@, IGHG1, |
| | IGHG2, IGHG3, IGHG4, IGHM, IGHV4-31, IGK@, IGKC, IGKV1-5, IGKV2-24, IGKV3- |
| | 20, IGSF3, IGSF8, IQGAP1, IQGAP2, ITGA2, ITGA3, ITGA6, ITGAV, ITGB1, ITGB4, |
| | JUP, KIAA0174, KIAA1199, KPNB1, KRAS, KRT1, KRT10, KRT13, KRT14, KRT15, |
| | KRT16, KRT17, KRT18, KRT19, KRT2, KRT20, KRT24, KRT25, KRT27, KRT28, KRT3, |
| | KRT4, KRT5, KRT6A, KRT6B, KRT6C, KRT7, KRT75, KRT76, KRT77, KRT79, KRT8, |
| | KRT9, LAMA5, LAMP1, LDHA, LDHB, LFNG, LGALS3, LGALS3BP, LGALS4, LIMA1, |
| | LIN7A, LIN7C, LOC100128936, LOC100130553, LOC100133382, LOC100133739, |
| | LOC284889, LOC388524, LOC388720, LOC442497, LOC653269, LRP4, LRPPRC, |
| | LRSAM1, LSR, LYZ, MAN1A1, MAP4K4, MARCKS, MARCKSL1, METRNL, MFGE8, |
| | MICA, MIF, MINK1, MITD1, MMP7, MOBKL1A, MSN, MTCH2, MUC13, MYADM, |
| | MYH10, MYH11, MYH14, MYH9, MYL6, MYL6B, MYO1C, MYO1D, NARS, NCALD, |
| | NCSTN, NEDD4, NEDD4L, NME1, NME2, NOTCH1, NQO1, NRAS, P4HB, PCBP1, |
| | PCNA, PCSK9, PDCD6, PDCD6IP, PDIA3, PDXK, PEBP1, PFN1, PGK1, PHB, PHB2, |
| | PKM2, PLEC1, PLEKHB2, PLSCR3, PLXNA1, PLXNB2, PPIA, PPIB, PPP2R1A, PRDX1, |
| | PRDX2, PRDX3, PRDX5, PRDX6, PRKAR2A, PRKDC, PRSS23, PSMA2, PSMC6, |
| | PSMD11, PSMD3, PSME3, PTGFRN, PTPRF, PYGB, QPCT, QSOX1, RAB10, RAB11A, |
| | RAB11B, RAB13, RAB14, RAB15, RAB1A, RAB1B, RAB2A, RAB33B, RAB35, RAB43, |
| | RAB4B, RAB5A, RAB5B, RAB5C, RAB6A, RAB6B, RAB7A, RAB8A, RAB8B, RAC1, |
| | RAC3, RALA, RALB, RAN, RANP1, RAP1A, RAP1B, RAP2A, RAP2B, RAP2C, RDX, |
| | REG4, RHOA, RHOC, RHOG, ROCK2, RP11-631M21.2, RPL10A, RPL12, RPL6, RPL8, |
| | RPLP0, RPLP0-like, RPLP1, RPLP2, RPN1, RPS13, RPS14, RPS15A, RPS16, RPS18, |
| | RPS20, RPS21, RPS27A, RPS3, RPS4X, RPS4Y1, RPS4Y2, RPS7, RPS8, RPSA, |
| | RPSAP15, RRAS, RRAS2, RUVBL1, RUVBL2, S100A10, S100A11, S100A14, S100A16, |
| | S100A6, S100P, SDC1, SDC4, SDCBP, SDCBP2, SERINC1, SERINC5, SERPINA1, |
| | SERPINF1, SETD4, SFN, SLC12A2, SLC12A7, SLC16A1, SLC1A5, SLC25A4, SLC25A5, |
| | SLC25A6, SLC29A1, SLC2A1, SLC3A2, SLC44A1, SLC7A5, SLC9A3R1, SMPDL3B, |
| | SNAP23, SND1, SOD1, SORT1, SPTAN1, SPTBN1, SSBP1, SSR4, TACSTD1, TAGLN2, |
| | TBCA, TCEB1, TCP1, TF, TFRC, THBS1, TJP2, TKT, TMED2, TNFSF10, TNIK, |
| | TNKS1BP1, TNPO3, TOLLIP, TOMM22, TPI1, TPM1, TRAP1, TSG101, TSPAN1, |
| | TSPAN14, TSPAN15, TSPAN6, TSPAN8, TSTA3, TTYH3, TUBA1A, TUBA1B, |
| | TUBA1C, TUBA3C, TUBA3D, TUBA3E, TUBA4A, TUBA4B, TUBA8, TUBB, TUBB2A, |
| | TUBB2B, TUBB2C, TUBB3, TUBB4, TUBB4Q, TUBB6, TUFM, TXN, UBA1, UBA52, |
| | UBB, UBC, UBE2N, UBE2V2, UGDH, UQCRC2, VAMP1, VAMP3, VAMP8, VCP, VIL1, |
| | VPS25, VPS28, VPS35, VPS36, VPS37B, VPS37C, WDR1, YWHAB, YWHAE, YWHAG, |
| | YWHAH, YWHAQ, YWHAZ |
| Colorectal Cancer | hsa-miR-16, hsa-miR-25, hsa-miR-125b, hsa-miR-451, hsa-miR-200c, hsa-miR-140-3p, hsa- |
| | miR-658, hsa-miR-370, hsa-miR-1296, hsa-miR-636, hsa-miR-502-5p |
| Breast cancer | miR-21, miR-155, miR-206, miR-122a, miR-210, miR-21, miR-155, miR-206, miR-122a, |
| | miR-210, let-7, miR-10b, miR-125a, miR-125b, miR-145, miR-143, miR-145, miR-1b |
| Breast cancer | GAS5 |
| Breast cancer | ER, PR, HER2, MUC1, EGFR, KRAS, B-Raf, CYP2D6, hsp70, MART-1, TRP, HER2, |
| | hsp70, MART-1, TRP, HER2, ER, PR, Class III b-tubulin, VEGFA, ETV6-NTRK3, BCA- |
| | 225, hsp70, MART1, ER, VEGFA, Class III b-tubulin, HER2/neu (e.g., for Her2+ breast |
| | cancer), GPR30, ErbB4 (JM) isoform, MPR8, MISIIR, CD9, EphA2, EGFR, B7H3, PSM, |
| | PCSA, CD63, STEAP, CD81, ICAM1, A33, DR3, CD66e, MFG-E8, TROP-2, |
| | Mammaglobin, Hepsin, NPGP/NPFF2, PSCA, 5T4, NGAL, EpCam, neurokinin receptor-1 |
| | (NK-1 or NK-1R), NK-2, Pai-1, CD45, CD10, HER2/ERBB2, AGTR1, NPY1R, MUC1, |
| | ESA, CD133, GPR30, BCA225, CD24, CA15.3 (MUC1 secreted), CA27.29 (MUC1 |
| | secreted), NMDAR1, NMDAR2, MAGEA, CTAG1B, NY-ESO-1, SPB, SPC, NSE, PGP9.5, |
| | progesterone receptor (PR) or its isoform (PR(A) or PR(B)), P2RX7, NDUFB7, NSE, GAL3, |
| | osteopontin, CHI3L1, IC3b, mesothelin, SPA, AQP5, GPCR, hCEA-CAM, PTP IA-2, |
| | CABYR, TMEM211, ADAM28, UNC93A, MUC17, MUC2, IL10R-beta, BCMA, |
| | HVEM/TNFRSF14, Trappin-2, Elafin, ST2/IL1 R4, TNFRF14, CEACAM1, TPA1, LAMP, |
| | WF, WH1000, PECAM, BSA, TNFR |
| Breast cancer | CD9, MIS Rii, ER, CD63, MUC1, HER3, STAT3, VEGFA, BCA, CA125, CD24, EPCAM, |
| | ERB B4 |
| Breast cancer | CD10, NPGP/NPFF2, HER2/ERBB2, AGTR1, NPY1R, neurokinin receptor-1 (NK-1 or NK- |
| | 1R), NK-2, MUC1, ESA, CD133, GPR30, BCA225, CD24, CA15.3 (MUC1 secreted), |
| | CA27.29 (MUC1 secreted), NMDAR1, NMDAR2, MAGEA, CTAG1B, NY-ESO-1 |
| Breast cancer | SPB, SPC, NSE, PGP9.5, CD9, P2RX7, NDUFB7, NSE, GAL3, osteopontin, CHI3L1, |
| | EGFR, B7H3, IC3b, MUC1, mesothelin, SPA, PCSA, CD63, STEAP, AQP5, CD81, DR3, |
| | PSM, GPCR, EphA2, hCEA-CAM, PTP IA-2, CABYR, TMEM211, ADAM28, UNC93A, |
| | A33, CD24, CD10, NGAL, EpCam, MUC17, TROP-2, MUC2, IL10R-beta, BCMA, |
| | HVEM/TNFRSF14, Trappin-2 Elafin, ST2/IL1 R4, TNFRF14, CEACAM1, TPA1, LAMP, |
| | WF, WH1000, PECAM, BSA, TNFR |
| Breast cancer | BRCA, MUC-1, MUC 16, CD24, ErbB4, ErbB2 (HER2), ErbB3, HSP70, Mammaglobin, |
| | PR, PR(B), VEGFA |
| Breast cancer | CD9, HSP70, Gal3, MIS, EGFR, ER, ICB3, CD63, B7H4, MUC1, DLL4, CD81, ERB3, |
| | VEGF, BCA225, BRCA, CA125, CD174, CD24, ERB2, NGAL, GPR30, CYFRA21, CD31, |
| | cMET, MUC2, ERBB4 |
| Breast cancer | CD9, EphA2, EGFR, B7H3, PSMA, PCSA, CD63, STEAP, CD81, STEAP1, ICAM1 |
| | (CD54), PSMA, A33, DR3, CD66e, MFG-8e, TMEM211, TROP-2, EGFR, Mammoglobin, |
| | Hepsin, NPGP/NPFF2, PSCA, 5T4, NGAL, NK-2, EpCam, NK-1R, PSMA, 5T4, PAI-1, |
| | CD45 |
| Breast cancer | PGP9.5, CD9, HSP70, gal3-b2c10, EGFR, iC3b, PSMA, PCSA, CD63, MUC1, DLL4, |
| | CD81, B7-H3, HER 3 (ErbB3), MART-1, PSA, VEGF A, TIMP-1, GPCR GPR110, EphA2, |
| | MMP9, mmp7, TMEM211, UNC93a, BRCA, CA125 (MUC16), Mammaglobin, CD174 |
| | (Lewis y), CD66e CEA, CD24 c.sn3, C-erbB2, CD10, NGAL, epcam, CEA |
| | (carcinoembryonic Antigen), GPR30, CYFRA21-1, OPN, MUC17, hVEGFR2, MUC2, |
| | NCAM, ASPH, ErbB4, SPB, SPC, CD9, MS4A1, EphA2, MIS RII, HER2 (ErbB2), ER, PR |
| | (B), MRP8, CD63, B7H4, TGM2, CD81, DR3, STAT 3, MACC-1, TrKB, IL 6 Unc, OPG- |
| | 13, IL6R, EZH2, SCRN1, TWEAK, SERPINB3, CDAC1, BCA-225, DR3, A33, |
| | NPGP/NPFF2, TIMP1, BDNF, FRT, Ferritin heavy chain, seprase, p53, LDH, HSP, ost, p53, |
| | CXCL12, HAP, CRP, Gro-alpha, Tsg 101, GDF15 |
| Breast cancer | CD9, HSP70, Gal3, MIS (RII), EGFR, ER, ICB3, CD63, B7H4, MUC1, CD81, ERB3, |
| | MART1, STAT3, VEGF, BCA225, BRCA, CA125, CD174, CD24, ERB2, NGAL, GPR30, |
| | CYFRA21, CD31, cMET, MUC2, ERB4, TMEM211 |
| Breast Cancer | 5T4 (trophoblast), ADAM10, AGER/RAGE, APC, APP (β-amyloid), ASPH (A-10), B7H3 |
| | (CD276), BACE1, BAI3, BRCA1, BDNF, BIRC2, C1GALT1, CA125 (MUC16), |
| | Calmodulin 1, CCL2 (MCP-1), CD9, CD10, CD127 (IL7R), CD174, CD24, CD44, CD63, |
| | CD81, CEA, CRMP-2, CXCR3, CXCR4, CXCR6, CYFRA 21, derlin 1, DLL4, DPP6, E- |
| | CAD, EpCaM, EphA2 (H-77), ER(1) ESR1α, ER(2) ESR2β, Erb B4, Erbb2, erb3 (Erb-B3), |
| | PA2G4, FRT (FLT1), Gal3, GPR30 (G-coupled ER1), HAP1, HER3, HSP-27, HSP70, IC3b, |
| | IL8, insig, junction plakoglobin, Keratin 15, KRAS, Mammaglobin, MART1, MCT2, |
| | MFGE8, MMP9, MRP8, Muc1, MUC17, MUC2, NCAM, NG2 (CSPG4), Ngal, NHE-3, |
| | NT5E (CD73), ODC1, OPG, OPN, p53, PARK7, PCSA, PGP9.5 (PARK5), PR(B), PSA, |
| | PSMA, RAGE, STXBP4, Survivin, TFF3 (secreted), TIMP1, TIMP2, TMEM211, TRAF4 |
| | (scaffolding), TRAIL-R2 (death Receptor 5), TrkB, Tsg 101, UNC93a, VEGF A, VEGFR2, |
| | YB-1, VEGFR1, GCDPF-15 (PIP), BigH3 (TGFb1-induced protein), 5HT2B (serotonin |
| | receptor 2B), BRCA2, BACE 1, CDH1-cadherin |
| Breast Cancer | AK5.2, ATP6V1B1, CRABP1 |
| Breast Cancer | DST.3, GATA3, KRT81 |
| Breast Cancer | AK5.2, ATP6V1B1, CRABP1, DST.3, ELF5, GATA3, KRT81, LALBA, OXTR, RASL10A, |
| | SERHL, TFAP2A.1, TFAP2A.3, TFAP2C, VTCN1 |
| Breast Cancer | TRAP; Renal Cell Carcinoma; Filamin; 14.3.3, Pan; Prohibitin; c-fos; Ang-2; GSTmu; Ang- |
| | 1; FHIT; Rad51; Inhibin alpha; Cadherin-P; 14.3.3 gamma; p18INK4c; P504S; XRCC2; |
| | Caspase 5; CREB-Binding Protein; Estrogen Receptor; IL17; Claudin 2; Keratin 8; GAPDH; |
| | CD1; Keratin, LMW; Gamma Glutamylcysteine Synthetase(GCS)/Glutamate-cysteine |
| | Ligase; a-B-Crystallin; Pax-5; MMP-19; APC; IL-3; Keratin 8 (phospho-specific Ser73); |
| | TGF-beta 2; ITK; Oct-2/; DJ-1; B7-H2; Plasma Cell Marker; Rad18; Estriol; Chk1; Prolactin |
| | Receptor; Laminin Receptor; Histone H1; CD45RO; GnRH Receptor; IP10/CRG2; Actin, |
| | Muscle Specific; S100; Dystrophin; Tubulin-a; CD3zeta; CDC37; GABA a Receptor 1; |
| | MMP-7 (Matrilysin); Heregulin; Caspase 3; CD56/NCAM-1; Gastrin 1; SREBP-1 (Sterol |
| | Regulatory Element Binding Protein-1); MLH1; PGP9.5; Factor VIII Related Antigen; ADP- |
| | ribosylation Factor (ARF-6); MHC II (HLA-DR) Ia; Survivin; CD23; G-CSF; CD2; |
| | Calretinin; Neuron Specific Enolase; CD165; Calponin; CD95/Fas; Urocortin; Heat Shock |
| | Protein 27/hsp27; Topo II beta; Insulin Receptor; Keratin 5/8; sm; Actin, skeletal muscle; |
| | CA19-9; GluR1; GRIP1; CD79a mb-1; TdT; HRP; CD94; CCK-8; Thymidine |
| | Phosphorylase; CD57; Alkaline Phosphatase (AP); CD59/MACIF/MIRL/Protectin; |
| | GLUT-1; alpha-1-antitrypsin; Presenillin; Mucin 3 (MUC3); pS2; 14-3-3 beta; MMP-13 |
| | (Collagenase-3); Fli-1; mGluR5; Mast Cell Chymase; Laminin B1/b1; Neurofilament |
| | (160 kDa); CNPase; Amylin Peptide; Gai1; CD6; alpha-1-antichymotrypsin; E2F-2; MyoD1 |
| Ductal carcinoma | Laminin B1/b1; E2F-2; TdT; Apolipoprotein D; Granulocyte; Alkaline Phosphatase (AP); |
| in situ (DCIS) | Heat Shock Protein 27/hsp27; CD95/Fas; pS2; Estriol; GLUT-1; Fibronectin; CD6; CCK-8; |
| | sm; Factor VIII Related Antigen; CD57; Plasminogen; CD71/Transferrin Receptor; Keratin |
| | 5/8; Thymidine Phosphorylase; CD45/T200/LCA; Epithelial Specific Antigen; Macrophage; |
| | CD10; MyoD1; Gai1; bcl-XL; hPL; Caspase 3; Actin, skeletal muscle; IP10/CRG2; GnRH |
| | Receptor; p35nck5a; ADP-ribosylation Factor (ARF-6); Cdk4; alpha-1-antitrypsin; IL17; |
| | Neuron Specific Enolase; CD56/NCAM-1; Prolactin Receptor; Cdk7; CD79a mb-1; Collagen |
| | IV; CD94; Myeloid Specific Marker; Keratin 10; Pax-5; IgM (m-Heavy Chain); CD45RO; |
| | CA19-9; Mucin 2; Glucagon; Mast Cell Chymase; MLH1; CD1; CNPase; Parkin; MHC II |
| | (HLA-DR) Ia; B7-H2; Chk1; Lambda Light Chain; MHC II (HLA-DP and DR); Myogenin; |
| | MMP-7 (Matrilysin); Topo II beta; CD53; Keratin 19; Rad18; Ret Oncoprotein; MHC II |
| | (HLA-DP); E3-binding protein (ARM1); Progesterone Receptor; Keratin 8; IgG; IgA; |
| | Tubulin; Insulin Receptor Substrate-1; Keratin 15; DR3; IL-3; Keratin 10/13; Cyclin D3; |
| | MHC I (HLA25 and HLA-Aw32); Calmodulin; Neurofilament (160 kDa) |
| Ductal carcinoma | Macrophage; Fibronectin; Granulocyte; Keratin 19; Cyclin D3; CD45/T200/LCA; EGFR; |
| in situ (DCIS) v. | Thrombospondin; CD81/TAPA-1; Ruv C; Plasminogen; Collagen IV; Laminin B1/b1; CD10; |
| other Breast cancer | TdT; Filamin; bcl-XL; 14.3.3 gamma; 14.3.3, Pan; p170; Apolipoprotein D; CD71/ |
| | Transferrin Receptor; FHIT |
| Breast cancer | 5HT2B, 5T4 (trophoblast), ACO2, ACSL3, ACTN4, ADAM10, AGR2, AGR3, ALCAM, |
| | ALDH6A1, ANGPTL4, ANO9, AP1G1, APC, APEX1, APLP2, APP (_-amyloid), ARCN1, |
| | ARHGAP35, ARL3, ASAH1, ASPH (A-10), ATP1B1, ATP1B3, ATP5I, ATP5O, ATXN1, |
| | B7H3, BACE1, BAI3, BAIAP2, BCA-200, BDNF, BigH3, BIRC2, BLVRB, BRCA, BST2, |
| | C1GALT1, C1GALT1C1, C20orf3, CA125, CACYBP, Calmodulin, CAPN1, CAPNS1, |
| | CCDC64B, CCL2 (MCP-1), CCT3, CD10(BD), CD127 (IL7R), CD174, CD24, CD44, |
| | CD80, CD86, CDH1, CDH5, CEA, CFL2, CHCHD3, CHMP3, CHRDL2, CIB1, CKAP4, |
| | COPA, COX5B, CRABP2, CRIP1, CRISPLD1, CRMP-2, CRTAP, CTLA4, CUL3, CXCR3, |
| | CXCR4, CXCR6, CYB5B, CYB5R1, CYCS, CYFRA 21, DBI, DDX23, DDX39B, derlin 1, |
| | DHCR7, DHX9, DLD, DLL4, DNAJB1, DPP6, DSTN, eCadherin, EEF1D, EEF2, EFTUD2, |
| | EIF4A2, EIF4A3, EpCaM, EphA2, ER(1) ESR1_, ER(2) ESR2_, Erb B4, Erb2, erb3 (Erb- |
| | B3?), ERLIN2, ESD, FARSA, FASN, FEN1, FKBP5, FLNB, FOXP3, FUS, Gal3, GCDPF- |
| | 15, GCNT2, GNA12, GNG5, GNPTG, GPC6, GPD2, GPER (GPR30), GSPT1, H3F3B, |
| | H3F3C, HADH, HAP1, HER3, HIST1H1C, HIST1H2AB, HIST1H3A, HIST1H3C, |
| | HIST1H3D, HIST1H3E, HIST1H3F, HIST1H3G, HIST1H3H, HIST1H3I, HIST1H3J, |
| | HIST2H2BF, HIST2H3A, HIST2H3C, HIST2H3D, HIST3H3, HMGB1, HNRNPA2B1, |
| | HNRNPAB, HNRNPC, HNRNPD, HNRNPH2, HNRNPK, HNRNPL, HNRNPM, |
| | HNRNPU, HPS3, HSP-27, HSP70, HSP90B1, HSPA1A, HSPA2, HSPA9, HSPE1, IC3b, |
| | IDE, IDH3B, IDO1, IFI30, IL1RL2, IL7, IL8, ILF2, ILF3, IQCG, ISOC2, IST1, ITGA7, |
| | ITGB7, junction plakoglobin, Keratin 15, KRAS, KRT19, KRT2, KRT7, KRT8, KRT9, |
| | KTN1, LAMP1, LMNA, LMNB1, LNPEP, LRPPRC, LRRC57, Mammaglobin, MAN1A1, |
| | MAN1A2, MART1, MATR3, MBD5, MCT2, MDH2, MFGE8, MFGE8, MGP, MMP9, |
| | MRP8, MUC1, MUC17, MUC2, MYO5B, MYOF, NAPA, NCAM, NCL, NG2 (CSPG4), |
| | Ngal, NHE-3, NME2, NONO, NPM1, NQO1, NT5E (CD73), ODC1, OPG, OPN (SC), OS9, |
| | p53, PACSIN3, PAICS, PARK7, PARVA, PC, PCNA, PCSA, PD-1, PD-L1, PD-L2, |
| | PGP9.5, PHB, PHB2, PIK3C2B, PKP3, PPL, PR(B)?, PRDX2, PRKCB, PRKCD, PRKDC, |
| | PSA, PSAP, PSMA, PSMB7, PSMD2, PSME3, PYCARD, RAB1A, RAB3D, RAB7A, |
| | RAGE, RBL2, RNPEP, RPL14, RPL27, RPL36, RPS25, RPS4X, RPS4Y1, RPS4Y2, |
| | RUVBL2, SET, SHMT2, SLAIN1, SLC39A14, SLC9A3R2, SMARCA4, SNRPD2, |
| | SNRPD3, SNX33, SNX9, SPEN, SPR, SQSTM1, SSBP1, ST3GAL1, STXBP4, SUB1, |
| | SUCLG2, Survivin, SYT9, TFF3 (secreted), TGOLN2, THBS1, TIMP1, TIMP2, TMED10, |
| | TMED4, TMED9, TMEM211, TOM1, TRAF4 (scaffolding), TRAIL-R2, TRAP1, TrkB, Tsg |
| | 101, TXNDC16, U2AF2, UEVLD, UFC1, UNC93a, USP14, VASP, VCP, VDAC1, VEGFA, |
| | VEGFR1, VEGFR2, VPS37C, WIZ, XRCC5, XRCC6, YB-1, YWHAZ |
| Lung cancer | Pgrmc1 (progesterone receptor membrane component 1)/sigma-2 receptor, STEAP, EZH2 |
| Lung cancer | Prohibitin, CD23, Amylin Peptide, HRP, Rad51, Pax-5, Oct-3/, GLUT-1, PSCA, |
| | Thrombospondin, FHIT, a-B-Crystallin, LewisA, Vacular Endothelial Growth |
| | Factor(VEGF), Hepatocyte Factor Homologue-4, Flt-4, GluR6/7, Prostate Apoptosis |
| | Response Protein-4, GluR1, Fli-1, Urocortin, S100A4, 14-3-3 beta, P504S, HDAC1, PGP9.5, |
| | DJ-1, COX2, MMP-19, Actin, skeletal muscle, Claudin 3, Cadherin-P, Collagen IX, |
| | p27Kip1, Cathepsin D, CD30 (Reed-Sternberg Cell Marker), Ubiquitin, FSH-b, TrxR2, |
| | CCK-8, Cyclin C, CD138, TGF-beta 2, Adrenocorticotrophic Hormone, PPAR-gamma, Bcl- |
| | 6, GLUT-3, IGF-I, mRANKL, Fas-ligand, Filamin, Calretinin, Oct-1, Parathyroid Hormone, |
| | Claudin 5, Claudin 4, Raf-1 (Phospho-specific), CDC14A Phosphatase, Mitochondria, APC, |
| | Gastrin 1, Ku (p80), Gai1, XPA, Maltose Binding Protein, Melanoma (gp100), |
| | Phosphotyrosine, Amyloid A, CXCR4/Fusin, Hepatic Nuclear Factor-3B, Caspase 1, HPV |
| | 16-E7, Axonal Growth Cones, Lck, Ornithine Decarboxylase, Gamma Glutamylcysteine |
| | Synthetase(GCS)/Glutamate-cysteine Ligase, ERCC1, Calmodulin, Caspase 7 (Mch 3), |
| | CD137 (4-1BB), Nitric Oxide Synthase, brain (bNOS), E2F-2, IL-10R, L-Plastin, CD18, |
| | Vimentin, CD50/ICAM-3, Superoxide Dismutase, Adenovirus Type 5 E1A, PHAS-I, |
| | Progesterone Receptor (phospho-specific) - Serine 294, MHC II (HLA-DQ), XPG, ER Ca+2 |
| | ATPase2, Laminin-s, E3-binding protein (ARM1), CD45RO, CD1, Cdk2, MMP-10 |
| | (Stromilysin-2), sm, Surfactant Protein B (Pro), Apolipoprotein D, CD46, Keratin 8 |
| | (phospho-specific Ser73), PCNA, PLAP, CD20, Syk, LH, Keratin 19, ADP-ribosylation |
| | Factor (ARF-6), Int-2 Oncoprotein, Luciferase, AIF (Apoptosis Inducing Factor), Grb2, bcl- |
| | X, CD16, Paxillin, MHC II (HLA-DP and DR), B-Cell, p21WAF1, MHC II (HLA-DR), |
| | Tyrosinase, E2F-1, Pds1, Calponin, Notch, CD26/DPP IV, SV40 Large T Antigen, Ku |
| | (p70/p80), Perforin, XPF, SIM Ag (SIMA-4D3), Cdk1/p34cdc2, Neuron Specific Enolase, b- |
| | 2-Microglobulin, DNA Polymerase Beta, Thyroid Hormone Receptor, Human, Alkaline |
| | Phosphatase (AP), Plasma Cell Marker, Heat Shock Protein 70/hsp70, TRP75/gp75, SRF |
| | (Serum Response Factor), Laminin B1/b1, Mast Cell Chymase, Caldesmon, CEA/CD66e, |
| | CD24, Retinoid X Receptor (hRXR), CD45/T200/LCA, Rabies Virus, Cytochrome c, DR3, |
| | bcl-XL, Fascin, CD71/Transferrin Receptor |
| Lung Cancer | miR-497 |
| Lung Cancer | Pgrmc1 |
| Ovarian Cancer | CA-125, CA 19-9, c-reactive protein, CD95(also called Fas, Fas antigen, Fas receptor, FasR, |
| | TNFRSF6, APT1 or APO-1), FAP-1, miR-200 microRNAs, EGFR, EGFRvIII, |
| | apolipoprotein AI, apolipoprotein CIII, myoglobin, tenascin C, MSH6, claudin-3, claudin-4, |
| | caveolin-1, coagulation factor III, CD9, CD36, CD37, CD53, CD63, CD81, CD136, CD147, |
| | Hsp70, Hsp90, Rab13, Desmocollin-1, EMP-2, CK7, CK20, GCDF15, CD82, Rab-5b, |
| | Annexin V, MFG-E8, HLA-DR. MiR-200 microRNAs (miR-200a, miR-200b, miR-200c), |
| | miR-141, miR-429, JNK, Jun |
| Prostate Cancer v | AQP2, BMP5, C16orf86, CXCL13, DST, ERCC1, GNAO1, KLHL5, MAP4K1, NELL2, |
| normal | PENK, PGF, POU3F1, PRSS21, SCML1, SEMG1, SMARCD3, SNAI2, TAF1C, TNNT3 |
| Prostate Cancer v | ADRB2, ARG2, C22orf32, CYorf14, EIF1AY, FEV, KLK2, KLK4, LRRC26, MAOA, |
| Breast Cancer | NLGN4Y, PNPLA7, PVRL3, SIM2, SLC30A4, SLC45A3, STX19, TRIM36, TRPM8 |
| Prostate Cancer v | ADRB2, BAIAP2L2, C19orf33, CDX1, CEACAM6, EEF1A2, ERN2, FAM110B, FOXA2, |
| Colorectal Cancer | KLK2, KLK4, LOC389816, LRRC26, MIPOL1, SLC45A3, SPDEF, TRIM31, TRIM36, |
| | ZNF613 |
| Prostate Cancer v | ASTN2, CAB39L, CRIP1, FAM110B, FEV, GSTP1, KLK2, KLK4, LOC389816, LRRC26, |
| Lung Cancer | MUC1, PNPLA7, SIM2, SLC45A3, SPDEF, TRIM36, TRPV6, ZNF613 |
| Prostate Cancer | miRs-26a + b, miR-15, miR-16, miR-195, miR-497, miR-424, miR-206, miR-342-5p, miR- |
| | 186, miR-1271, miR-600, miR-216b, miR-519 family, miR-203 |
| Integrins | ITGA1 (CD49a, VLA1), ITGA2 (CD49b, VLA2), ITGA3 (CD49c, VLA3), ITGA4 (CD49d, |
| | VLA4), ITGA5 (CD49e, VLA5), ITGA6 (CD49f, VLA6), ITGA7 (FLJ25220), ITGA8, |
| | ITGA9 (RLC), ITGA10, ITGA11 (HsT18964), ITGAD (CD11D, FLJ39841), ITGAE |
| | (CD103, HUMINAE), ITGAL (CD11a, LFA1A), ITGAM (CD11b, MAC-1), ITGAV |
| | (CD51, VNRA, MSK8), ITGAW, ITGAX (CD11c), ITGB1 (CD29, FNRB, MSK12, |
| | MDF20), ITGB2 (CD18, LFA-1, MAC-1, MFI7), ITGB3 (CD61, GP3A, GPIIIa), ITGB4 |
| | (CD104), ITGB5 (FLJ26658), ITGB6, ITGB7, ITGB8 |
| Glycoprotein | GpIa-IIa, GpIIb-IIIa, GpIIIb, GpIb, GpIX |
| Transcription | STAT3, EZH2, p53, MACC1, SPDEF, RUNX2, YB-1 |
| factors | |
| Kinases | AURKA, AURKB |
| Disease Markers | 6Ckine, Adiponectin, Adrenocorticotropic Hormone, Agouti-Related Protein, Aldose |
| | Reductase, Alpha-1-Antichymotrypsin, Alpha-1-Antitrypsin, Alpha-1-Microglobulin, Alpha- |
| | 2-Macroglobulin, Alpha-Fetoprotein, Amphiregulin, Angiogenin, Angiopoietin-2, |
| | Angiotensin-Converting Enzyme, Angiotensinogen, Annexin A1, Apolipoprotein A-I, |
| | Apolipoprotein A-II, Apolipoprotein A-IV, Apolipoprotein B, Apolipoprotein C-I, |
| | Apolipoprotein C-III, Apolipoprotein D, Apolipoprotein E, Apolipoprotein H, |
| | Apolipoprotein(a), AXL Receptor Tyrosine Kinase, B cell-activating Factor, B Lymphocyte |
| | Chemoattractant, Bcl-2-like protein 2, Beta-2-Microglobulin, Betacellulin, Bone |
| | Morphogenetic Protein 6, Brain-Derived Neurotrophic Factor, Calbindin, Calcitonin, Cancer |
| | Antigen 125, Cancer Antigen 15-3, Cancer Antigen 19-9, Cancer Antigen 72-4, |
| | Carcinoembryonic Antigen, Cathepsin D, CD 40 antigen, CD40 Ligand, CD5 Antigen-like, |
| | Cellular Fibronectin, Chemokine CC-4, Chromogranin-A, Ciliary Neurotrophic Factor, |
| | Clusterin, Collagen IV, Complement C3, Complement Factor H, Connective Tissue Growth |
| | Factor, Cortisol, C-Peptide, C-Reactive Protein, Creatine Kinase-MB, Cystatin-C, Endoglin, |
| | Endostatin, Endothelin-1, EN-RAGE, Eotaxin-1, Eotaxin-2, Eotaxin-3, Epidermal Growth |
| | Factor, Epiregulin, Epithelial cell adhesion molecule, Epithelial-Derived Neutrophil- |
| | Activating Protein 78, Erythropoietin, E-Selectin, Ezrin, Factor VII, Fas Ligand, FASLG |
| | Receptor, Fatty Acid-Binding Protein (adipocyte), Fatty Acid-Binding Protein (heart), Fatty |
| | Acid-Binding Protein (liver), Ferritin, Fetuin-A, Fibrinogen, Fibroblast Growth Factor 4, |
| | Fibroblast Growth Factor basic, Fibulin-1C, Follicle-Stimulating Hormone, Galectin-3, |
| | Gelsolin, Glucagon, Glucagon-like Peptide 1, Glucose-6-phosphate Isomerase, Glutamate- |
| | Cysteine Ligase Regulatory subunit, Glutathione S-Transferase alpha, Glutathione S- |
| | Transferase Mu 1, Granulocyte Colony-Stimulating Factor, Granulocyte-Macrophage |
| | Colony-Stimulating Factor, Growth Hormone, Growth-Regulated alpha protein, Haptoglobin, |
| | HE4, Heat Shock Protein 60, Heparin-Binding EGF-Like Growth Factor, Hepatocyte Growth |
| | Factor, Hepatocyte Growth Factor Receptor, Hepsin, Human Chorionic Gonadotropin beta, |
| | Human Epidermal Growth Factor Receptor 2, Immunoglobulin A, Immunoglobulin E, |
| | Immunoglobulin M, Insulin, Insulin-like Growth Factor I, Insulin-like Growth Factor- |
| | Binding Protein 1, Insulin-like Growth Factor-Binding Protein 2, Insulin-like Growth Factor- |
| | Binding Protein 3, Insulin-like Growth Factor Binding Protein 4, Insulin-like Growth Factor |
| | Binding Protein 5, Insulin-like Growth Factor Binding Protein 6, Intercellular Adhesion |
| | Molecule 1, Interferon gamma, Interferon gamma Induced Protein 10, Interferon-inducible T- |
| | cell alpha chemoattractant, Interleukin-1 alpha, Interleukin-1 beta, Interleukin-1 Receptor |
| | antagonist, Interleukin-2, Interleukin-2 Receptor alpha, Interleukin-3, Interleukin-4, |
| | Interleukin-5, Interleukin-6, Interleukin-6 Receptor, Interleukin-6 Receptor subunit beta, |
| | Interleukin-7, Interleukin-8, Interleukin-10, Interleukin-11, Interleukin-12 Subunit p40, |
| | Interleukin-12 Subunit p70, Interleukin-13, Interleukin-15, Interleukin-16, Interleukin-25, |
| | Kallikrein 5, Kallikrein-7, Kidney Injury Molecule-1, Lactoylglutathione lyase, Latency- |
| | Associated Peptide of Transforming Growth Factor beta 1, Lectin-Like Oxidized LDL |
| | Receptor 1, Leptin, Luteinizing Hormone, Lymphotactin, Macrophage Colony-Stimulating |
| | Factor 1, Macrophage Inflammatory Protein-1 alpha, Macrophage Inflammatory Protein-1 |
| | beta, Macrophage Inflammatory Protein-3 alpha, Macrophage inflammatory protein 3 beta, |
| | Macrophage Migration Inhibitory Factor, Macrophage-Derived Chemokine, Macrophage- |
| | Stimulating Protein, Malondialdehyde-Modified Low-Density Lipoprotein, Maspin, Matrix |
| | Metalloproteinase-1, Matrix Metalloproteinase-2, Matrix Metalloproteinase-3, Matrix |
| | Metalloproteinase-7, Matrix Metalloproteinase-9, Matrix Metalloproteinase-9, Matrix |
| | Metalloproteinase-10, Mesothelin, MHC class I chain-related protein A, Monocyte |
| | Chemotactic Protein 1, Monocyte Chemotactic Protein 2, Monocyte Chemotactic Protein 3, |
| | Monocyte Chemotactic Protein 4, Monokine Induced by Gamma Interferon, Myeloid |
| | Progenitor Inhibitory Factor 1, Myeloperoxidase, Myoglobin, Nerve Growth Factor beta, |
| | Neuronal Cell Adhesion Molecule, Neuron-Specific Enolase, Neuropilin-1, Neutrophil |
| | Gelatinase-Associated Lipocalin, NT-proBNP, Nucleoside diphosphate kinase B, |
| | Osteopontin, Osteoprotegerin, Pancreatic Polypeptide, Pepsinogen I, Peptide YY, |
| | Peroxiredoxin-4, Phosphoserine Aminotransferase, Placenta Growth Factor, Plasminogen |
| | Activator Inhibitor 1, Platelet-Derived Growth Factor BB, Pregnancy-Associated Plasma |
| | Protein A, Progesterone, Proinsulin (inc. Total or Intact), Prolactin, Prostasin, Prostate- |
| | Specific Antigen (inc. Free PSA), Prostatic Acid Phosphatase, Protein S100-A4, Protein |
| | S100-A6, Pulmonary and Activation-Regulated Chemokine, Receptor for advanced |
| | glycosylation end products, Receptor tyrosine-protein kinase erbB-3, Resistin, S100 calcium- |
| | binding protein B, Secretin, Serotransferrin, Serum Amyloid P-Component, Serum Glutamic |
| | Oxaloacetic Transaminase, Sex Hormone-Binding Globulin, Sortilin, Squamous Cell |
| | Carcinoma Antigen-1, Stem Cell Factor, Stromal cell-derived Factor-1, Superoxide |
| | Dismutase 1 (soluble), T Lymphocyte-Secreted Protein I-309, Tamm-Horsfall Urinary |
| | Glycoprotein, T-Cell-Specific Protein RANTES, Tenascin-C, Testosterone, Tetranectin, |
| | Thrombomodulin, Thrombopoietin, Thrombospondin-1, Thyroglobulin, Thyroid-Stimulating |
| | Hormone, Thyroxine-Binding Globulin, Tissue Factor, Tissue Inhibitor of Metalloproteinases |
| | 1, Tissue type Plasminogen activator, TNF-Related Apoptosis-Inducing Ligand Receptor 3, |
| | Transforming Growth Factor alpha, Transforming Growth Factor beta-3, Transthyretin, |
| | Trefoil Factor 3, Tumor Necrosis Factor alpha, Tumor Necrosis Factor beta, Tumor Necrosis |
| | Factor Receptor I, Tumor necrosis Factor Receptor 2, Tyrosine kinase with Ig and EGF |
| | homology domains 2, Urokinase-type Plasminogen Activator, Urokinase-type plasminogen |
| | activator Receptor, Vascular Cell Adhesion Molecule-1, Vascular Endothelial Growth Factor, |
| | Vascular endothelial growth Factor B, Vascular Endothelial Growth Factor C, Vascular |
| | endothelial growth Factor D, Vascular Endothelial Growth Factor Receptor 1, Vascular |
| | Endothelial Growth Factor Receptor 2, Vascular endothelial growth Factor Receptor 3, |
| | Vitamin K-Dependent Protein S, Vitronectin, von Willebrand Factor, YKL-40 |
| Disease Markers | Adiponectin, Adrenocorticotropic Hormone, Agouti-Related Protein, Alpha-1- |
| | Antichymotrypsin, Alpha-1-Antitrypsin, Alpha-1-Microglobulin, Alpha-2-Macroglobulin, |
| | Alpha-Fetoprotein, Amphiregulin, Angiopoietin-2, Angiotensin-Converting Enzyme, |
| | Angiotensinogen, Apolipoprotein A-I, Apolipoprotein A-II, Apolipoprotein A-IV, |
| | Apolipoprotein B, Apolipoprotein C-I, Apolipoprotein C-III, Apolipoprotein D, |
| | Apolipoprotein E, Apolipoprotein H, Apolipoprotein(a), AXL Receptor Tyrosine Kinase, B |
| | Lymphocyte Chemoattractant, Beta-2-Microglobulin, Betacellulin, Bone Morphogenetic |
| | Protein 6, Brain-Derived Neurotrophic Factor, Calbindin, Calcitonin, Cancer Antigen 125, |
| | Cancer Antigen 19-9, Carcinoembryonic Antigen, CD 40 antigen, CD40 Ligand, CD5 |
| | Antigen-like, Chemokine CC-4, Chromogranin-A, Ciliary Neurotrophic Factor, Clusterin, |
| | Complement C3, Complement Factor H, Connective Tissue Growth Factor, Cortisol, C- |
| | Peptide, C-Reactive Protein, Creatine Kinase-MB, Cystatin-C, Endothelin-1, EN-RAGE, |
| | Eotaxin-1, Eotaxin-3, Epidermal Growth Factor, Epiregulin, Epithelial-Derived Neutrophil- |
| | Activating Protein 78, Erythropoietin, E-Selectin, Factor VII, Fas Ligand, FASLG Receptor, |
| | Fatty Acid-Binding Protein (heart), Ferritin, Fetuin-A, Fibrinogen, Fibroblast Growth Factor |
| | 4, Fibroblast Growth Factor basic, Follicle-Stimulating Hormone, Glucagon, Glucagon-like |
| | Peptide 1, Glutathione S-Transferase alpha, Granulocyte Colony-Stimulating Factor, |
| | Granulocyte-Macrophage Colony-Stimulating Factor, Growth Hormone, Growth-Regulated |
| | alpha protein, Haptoglobin, Heat Shock Protein 60, Heparin-Binding EGF-Like Growth |
| | Factor, Hepatocyte Growth Factor, Immunoglobulin A, Immunoglobulin E, Immunoglobulin |
| | M, Insulin, Insulin-like Growth Factor I, Insulin-like Growth Factor-Binding Protein 2, |
| | Intercellular Adhesion Molecule 1, Interferon gamma, Interferon gamma Induced Protein 10, |
| | Interleukin-1 alpha, Interleukin-1 beta, Interleukin-1 Receptor antagonist, Interleukin-2, |
| | Interleukin-3, Interleukin-4, Interleukin-5, Interleukin-6, Interleukin-6 Receptor, Interleukin- |
| | 7, Interleukin-8, Interleukin-10, Interleukin-11, Interleukin-12 Subunit p40, Interleukin-12 |
| | Subunit p70, Interleukin-13, Interleukin-15, Interleukin-16, Interleukin-25, Kidney Injury |
| | Molecule-1, Lectin-Like Oxidized LDL Receptor 1, Leptin, Luteinizing Hormone, |
| | Lymphotactin, Macrophage Colony-Stimulating Factor 1, Macrophage Inflammatory Protein- |
| | 1 alpha, Macrophage Inflammatory Protein-1 beta, Macrophage Inflammatory Protein-3 |
| | alpha, Macrophage Migration Inhibitory Factor, Macrophage-Derived Chemokine, |
| | Malondialdehyde-Modified Low-Density Lipoprotein, Matrix Metalloproteinase-1, Matrix |
| | Metalloproteinase-2, Matrix Metalloproteinase-3, Matrix Metalloproteinase-7, Matrix |
| | Metalloproteinase-9, Matrix Metalloproteinase-9, Matrix Metalloproteinase-10, Monocyte |
| | Chemotactic Protein 1, Monocyte Chemotactic Protein 2, Monocyte Chemotactic Protein 3, |
| | Monocyte Chemotactic Protein 4, Monokine Induced by Gamma Interferon, Myeloid |
| | Progenitor Inhibitory Factor 1, Myeloperoxidase, Myoglobin, Nerve Growth Factor beta, |
| | Neuronal Cell Adhesion Molecule, Neutrophil Gelatinase-Associated Lipocalin, NT-proBNP, |
| | Osteopontin, Pancreatic Polypeptide, Peptide YY, Placenta Growth Factor, Plasminogen |
| | Activator Inhibitor 1, Platelet-Derived Growth Factor BB, Pregnancy-Associated Plasma |
| | Protein A, Progesterone, Proinsulin (inc. Intact or Total), Prolactin, Prostate-Specific Antigen |
| | (inc. Free PSA), Prostatic Acid Phosphatase, Pulmonary and Activation-Regulated |
| | Chemokine, Receptor for advanced glycosylation end products, Resistin, S100 calcium- |
| | binding protein B, Secretin, Serotransferrin, Serum Amyloid P-Component, Serum Glutamic |
| | Oxaloacetic Transaminase, Sex Hormone-Binding Globulin, Sortilin, Stem Cell Factor, |
| | Superoxide Dismutase 1 (soluble), T Lymphocyte-Secreted Protein I-309, Tamm-Horsfall |
| | Urinary Glycoprotein, T-Cell-Specific Protein RANTES, Tenascin-C, Testosterone, |
| | Thrombomodulin, Thrombopoietin, Thrombospondin-1, Thyroid-Stimulating Hormone, |
| | Thyroxine-Binding Globulin, Tissue Factor, Tissue Inhibitor of Metalloproteinases 1, TNF- |
| | Related Apoptosis-Inducing Ligand Receptor 3, Transforming Growth Factor alpha, |
| | Transforming Growth Factor beta-3, Transthyretin, Trefoil Factor 3, Tumor Necrosis Factor |
| | alpha, Tumor Necrosis Factor beta, Tumor necrosis Factor Receptor 2, Vascular Cell |
| | Adhesion Molecule-1, Vascular Endothelial Growth Factor, Vitamin K-Dependent Protein S, |
| | Vitronectin, von Willebrand Factor |
| Oncology | 6Ckine, Aldose Reductase, Alpha-Fetoprotein, Amphiregulin, Angiogenin, Annexin A1, B |
| | cell-activating Factor, B Lymphocyte Chemoattractant, Bcl-2-like protein 2, Betacellulin, |
| | Cancer Antigen 125, Cancer Antigen 15-3, Cancer Antigen 19-9, Cancer Antigen 72-4, |
| | Carcinoembryonic Antigen, Cathepsin D, Cellular Fibronectin, Collagen IV, Endoglin, |
| | Endostatin, Eotaxin-2, Epidermal Growth Factor, Epiregulin, Epithelial cell adhesion |
| | molecule, Ezrin, Fatty Acid-Binding Protein (adipocyte), Fatty Acid-Binding Protein (liver), |
| | Fibroblast Growth Factor basic, Fibulin-1C, Galectin-3, Gelsolin, Glucose-6-phosphate |
| | Isomerase, Glutamate-Cysteine Ligase Regulatory subunit, Glutathione S-Transferase Mu 1, |
| | HE4, Heparin-Binding EGF-Like Growth Factor, Hepatocyte Growth Factor, Hepatocyte |
| | Growth Factor Receptor, Hepsin, Human Chorionic Gonadotropin beta, Human Epidermal |
| | Growth Factor Receptor 2, Insulin-like Growth Factor-Binding Protein 1, Insulin-like Growth |
| | Factor-Binding Protein 2, Insulin-like Growth Factor-Binding Protein 3, Insulin-like Growth |
| | Factor Binding Protein 4, Insulin-like Growth Factor Binding Protein 5, Insulin-like Growth |
| | Factor Binding Protein 6, Interferon gamma Induced Protein 10, Interferon-inducible T-cell |
| | alpha chemoattractant, Interleukin-2 Receptor alpha, Interleukin-6, Interleukin-6 Receptor |
| | subunit beta, Kallikrein 5, Kallikrein-7, Lactoylglutathione lyase, Latency-Associated Peptide |
| | of Transforming Growth Factor beta 1, Leptin, Macrophage inflammatory protein 3 beta, |
| | Macrophage Migration Inhibitory Factor, Macrophage-Stimulating Protein, Maspin, Matrix |
| | Metalloproteinase-2, Mesothelin, MHC class I chain-related protein A, Monocyte |
| | Chemotactic Protein 1, Monokine Induced by Gamma Interferon, Neuron-Specific Enolase, |
| | Neuropilin-1, Neutrophil Gelatinase-Associated Lipocalin, Nucleoside diphosphate kinase B, |
| | Osteopontin, Osteoprotegerin, Pepsinogen I, Peroxiredoxin-4, Phosphoserine |
| | Aminotransferase, Placenta Growth Factor, Platelet-Derived Growth Factor BB, Prostasin, |
| | Protein S100-A4, Protein S100-A6, Receptor tyrosine-protein kinase erbB-3, Squamous Cell |
| | Carcinoma Antigen-1, Stromal cell-derived Factor-1, Tenascin-C, Tetranectin, |
| | Thyroglobulin, Tissue type Plasminogen activator, Transforming Growth Factor alpha, |
| | Tumor Necrosis Factor Receptor I, Tyrosine kinase with Ig and EGF homology domains 2, |
| | Urokinase-type Plasminogen Activator, Urokinase-type plasminogen activator Receptor, |
| | Vascular Endothelial Growth Factor, Vascular endothelial growth Factor B, Vascular |
| | Endothelial Growth Factor C, Vascular endothelial growth Factor D, Vascular Endothelial |
| | Growth Factor Receptor 1, Vascular Endothelial Growth Factor Receptor 2, Vascular |
| | endothelial growth Factor Receptor 3, YKL-40 |
| Disease | Adiponectin, Alpha-1-Antitrypsin, Alpha-2-Macroglobulin, Alpha-Fetoprotein, |
| | Apolipoprotein A-I, Apolipoprotein C-III, Apolipoprotein H, Apolipoprotein(a), Beta-2- |
| | Microglobulin, Brain-Derived Neurotrophic Factor, Calcitonin, Cancer Antigen 125, Cancer |
| | Antigen 19-9, Carcinoembryonic Antigen, CD 40 antigen, CD40 Ligand, Complement C3, C- |
| | Reactive Protein, Creatine Kinase-MB, Endothelin-1, EN-RAGE, Eotaxin-1, Epidermal |
| | Growth Factor, Epithelial-Derived Neutrophil-Activating Protein 78, Erythropoietin, Factor |
| | VII, Fatty Acid-Binding Protein (heart), Ferritin, Fibrinogen, Fibroblast Growth Factor basic, |
| | Granulocyte Colony-Stimulating Factor, Granulocyte-Macrophage Colony-Stimulating |
| | Factor, Growth Hormone, Haptoglobin, Immunoglobulin A, Immunoglobulin E, |
| | Immunoglobulin M, Insulin, Insulin-like Growth Factor I, Intercellular Adhesion Molecule 1, |
| | Interferon gamma, Interleukin-1 alpha, Interleukin-1 beta, Interleukin-1 Receptor antagonist, |
| | Interleukin-2, Interleukin-3, Interleukin-4, Interleukin-5, Interleukin-6, Interleukin-7, |
| | Interleukin-8, Interleukin-10, Interleukin-12 Subunit p40, Interleukin-12 Subunit p70, |
| | Interleukin-13, Interleukin-15, Interleukin-16, Leptin, Lymphotactin, Macrophage |
| | Inflammatory Protein-1 alpha, Macrophage Inflammatory Protein-1 beta, Macrophage- |
| | Derived Chemokine, Matrix Metalloproteinase-2, Matrix Metalloproteinase-3, Matrix |
| | Metalloproteinase-9, Monocyte Chemotactic Protein 1, Myeloperoxidase, Myoglobin, |
| | Plasminogen Activator Inhibitor 1, Pregnancy-Associated Plasma Protein A, Prostate- |
| | Specific Antigen (inc. Free PSA), Prostatic Acid Phosphatase, Serum Amyloid P-Component, |
| | Serum Glutamic Oxaloacetic Transaminase, Sex Hormone-Binding Globulin, Stem Cell |
| | Factor, T-Cell-Specific Protein RANTES, Thrombopoietin, Thyroid-Stimulating Hormone, |
| | Thyroxine-Binding Globulin, Tissue Factor, Tissue Inhibitor of Metalloproteinases 1, Tumor |
| | Necrosis Factor alpha, Tumor Necrosis Factor beta, Tumor Necrosis Factor Receptor 2, |
| | Vascular Cell Adhesion Molecule-1, Vascular Endothelial Growth Factor, von Willebrand |
| | Factor |
| Neurological | Alpha-1-Antitrypsin, Apolipoprotein A-I, Apolipoprotein A-II, Apolipoprotein B, |
| | Apolipoprotein C-I, Apolipoprotein H, Beta-2-Microglobulin, Betacellulin, Brain-Derived |
| | Neurotrophic Factor, Calbindin, Cancer Antigen 125, Carcinoembryonic Antigen, CD5 |
| | Antigen-like, Complement C3, Connective Tissue Growth Factor, Cortisol, Endothelin-1, |
| | Epidermal Growth Factor Receptor, Ferritin, Fetuin-A, Follicle-Stimulating Hormone, |
| | Haptoglobin, Immunoglobulin A, Immunoglobulin M, Intercellular Adhesion Molecule 1, |
| | Interleukin-6 Receptor, Interleukin-7, Interleukin-10, Interleukin-11, Interleukin-17, Kidney |
| | Injury Molecule-1, Luteinizing Hormone, Macrophage-Derived Chemokine, Macrophage |
| | Migration Inhibitory Factor, Macrophage Inflammatory Protein-1 alpha, Matrix |
| | Metalloproteinase-2, Monocyte Chemotactic Protein 2, Peptide YY, Prolactin, Prostatic Acid |
| | Phosphatase, Serotransferrin, Serum Amyloid P-Component, Sortilin, Testosterone, |
| | Thrombopoietin, Thyroid-Stimulating Hormone, Tissue Inhibitor of Metalloproteinases 1, |
| | TNF-Related Apoptosis-Inducing Ligand Receptor 3, Tumor necrosis Factor Receptor 2, |
| | Vascular Endothelial Growth Factor, Vitronectin |
| Cardiovascular | Adiponectin, Apolipoprotein A-I, Apolipoprotein B, Apolipoprotein C-III, Apolipoprotein D, |
| | Apolipoprotein E, Apolipoprotein H, Apolipoprotein(a), Clusterin, C-Reactive Protein, |
| | Cystatin-C, EN-RAGE, E-Selectin, Fatty Acid-Binding Protein (heart), Ferritin, Fibrinogen, |
| | Haptoglobin, Immunoglobulin M, Intercellular Adhesion Molecule 1, Interleukin-6, |
| | Interleukin-8, Lectin-Like Oxidized LDL Receptor 1, Leptin, Macrophage Inflammatory |
| | Protein-1 alpha, Macrophage Inflammatory Protein-1 beta, Malondialdehyde-Modified Low- |
| | Density Lipoprotein, Matrix Metalloproteinase-1, Matrix Metalloproteinase-10, Matrix |
| | Metalloproteinase-2, Matrix Metalloproteinase-3, Matrix Metalloproteinase-7, Matrix |
| | Metalloproteinase-9, Monocyte Chemotactic Protein 1, Myeloperoxidase, Myoglobin, NT- |
| | proBNP, Osteopontin, Plasminogen Activator Inhibitor 1, P-Selectin, Receptor for advanced |
| | glycosylation end products, Serum Amyloid P-Component, Sex Hormone-Binding Globulin, |
| | T-Cell-Specific Protein RANTES, Thrombomodulin, Thyroxine-Binding Globulin, Tissue |
| | Inhibitor of Metalloproteinases 1, Tumor Necrosis Factor alpha, Tumor necrosis Factor |
| | Receptor 2, Vascular Cell Adhesion Molecule-1, von Willebrand Factor |
| Inflammatory | Alpha-1-Antitrypsin, Alpha-2-Macroglobulin, Beta-2-Microglobulin, Brain-Derived |
| | Neurotrophic Factor, Complement C3, C-Reactive Protein, Eotaxin-1, Factor VII, Ferritin, |
| | Fibrinogen, Granulocyte-Macrophage Colony-Stimulating Factor, Haptoglobin, Intercellular |
| | Adhesion Molecule 1, Interferon gamma, Interleukin-1 alpha, Interleukin-1 beta, Interleukin- |
| | 1 Receptor antagonist, Interleukin-2, Interleukin-3, Interleukin-4, Interleukin-5, Interleukin-6, |
| | Interleukin-7, Interleukin-8, Interleukin-10, Interleukin-12 Subunit p40, Interleukin-12 |
| | Subunit p70, Interleukin-15, Interleukin-17, Interleukin-23, Macrophage Inflammatory |
| | Protein-1 alpha, Macrophage Inflammatory Protein-1 beta, Matrix Metalloproteinase-2, |
| | Matrix Metalloproteinase-3, Matrix Metalloproteinase-9, Monocyte Chemotactic Protein 1, |
| | Stem Cell Factor, T-Cell-Specific Protein RANTES, Tissue Inhibitor of Metalloproteinases 1, |
| | Tumor Necrosis Factor alpha, Tumor Necrosis Factor beta, Tumor necrosis Factor Receptor |
| | 2, Vascular Cell Adhesion Molecule-1, Vascular Endothelial Growth Factor, Vitamin D- |
| | Binding Protein, von Willebrand Factor |
| Metabolic | Adiponectin, Adrenocorticotropic Hormone, Angiotensin-Converting Enzyme, |
| | Angiotensinogen, Complement C3 alpha des arg, Cortisol, Follicle-Stimulating Hormone, |
| | Galanin, Glucagon, Glucagon-like Peptide 1, Insulin, Insulin-like Growth Factor I, Leptin, |
| | Luteinizing Hormone, Pancreatic Polypeptide, Peptide YY, Progesterone, Prolactin, Resistin, |
| | Secretin, Testosterone |
| Kidney | Alpha-1-Microglobulin, Beta-2-Microglobulin, Calbindin, Clusterin, Connective Tissue |
| | Growth Factor, Creatinine, Cystatin-C, Glutathione S-Transferase alpha, Kidney Injury |
| | Molecule-1, Microalbumin, Neutrophil Gelatinase-Associated Lipocalin, Osteopontin, |
| | Tamm-Horsfall Urinary Glycoprotein, Tissue Inhibitor of Metalloproteinases 1, Trefoil |
| | Factor 3, Vascular Endothelial Growth Factor |
| Cytokines | Granulocyte-Macrophage Colony-Stimulating Factor, Interferon gamma, Interleukin-2, |
| | Interleukin-3, Interleukin-4, Interleukin-5, Interleukin-6, Interleukin-7, Interleukin-8, |
| | Interleukin-10, Macrophage Inflammatory Protein-1 alpha, Macrophage Inflammatory |
| | Protein-1 beta, Matrix Metalloproteinase-2, Monocyte Chemotactic Protein 1, Tumor |
| | Necrosis Factor alpha, Tumor Necrosis Factor beta, Brain-Derived Neurotrophic Factor, |
| | Eotaxin-1, Intercellular Adhesion Molecule 1, Interleukin-1 alpha, Interleukin-1 beta, |
| | Interleukin-1 Receptor antagonist, Interleukin-12 Subunit p40, Interleukin-12 Subunit p70, |
| | Interleukin-15, Interleukin-17, Interleukin-23, Matrix Metalloproteinase-3, Stem Cell Factor, |
| | Vascular Endothelial Growth Factor |
| Protein | 14.3.3 gamma, 14.3.3 (Pan), 14-3-3 beta, 6-Histidine, a-B-Crystallin, Acinus, Actin beta, |
| | Actin (Muscle Specific), Actin (Pan), Actin (skeletal muscle), Activin Receptor Type II, |
| | Adenovirus, Adenovirus Fiber, Adenovirus Type 2 E1A, Adenovirus Type 5 E1A, ADP- |
| | ribosylation Factor (ARF-6), Adrenocorticotrophic Hormone, AIF (Apoptosis Inducing |
| | Factor), Alkaline Phosphatase (AP), Alpha Fetoprotein (AFP), Alpha Lactalbumin, alpha-1- |
| | antichymotrypsin, alpha-1-antitrypsin, Amphiregulin, Amylin Peptide, Amyloid A, Amyloid |
| | A4 Protein Precursor, Amyloid Beta (APP), Androgen Receptor, Ang-1, Ang-2, APC, |
| | APC11, APC2, Apolipoprotein D, A-Raf, ARC, Ask1/MAPKKK5, ATM, Axonal Growth |
| | Cones, b Galactosidase, b-2-Microglobulin, B7-H2, BAG-1, Bak, Bax, B-Cell, B-cell Linker |
| | Protein (BLNK), Bcl10/CIPER/CLAP/mE10, bcl-2a, Bcl-6, bcl-X, bcl-XL, Bim (BOD), |
| | Biotin, Bonzo/STRL33/TYMSTR, Bovine Serum Albumin, BRCA2 (aa 1323-1346), |
| | BrdU, Bromodeoxyuridine (BrdU), CA125, CA19-9, c-Abl, Cadherin (Pan), Cadherin-E, |
| | Cadherin-P, Calcitonin, Calcium Pump ATPase, Caldesmon, Calmodulin, Calponin, |
| | Calretinin, Casein, Caspase 1, Caspase 2, Caspase 3, Caspase 5, Caspase 6 (Mch 2), Caspase |
| | 7 (Mch 3), Caspase 8 (FLICE), Caspase 9, Catenin alpha, Catenin beta, Catenin gamma, |
| | Cathepsin D, CCK-8, CD1, CD10, CD100/Leukocyte Semaphorin, CD105, CD106/VCAM, |
| | CD115/c-fms/CSF-1R/M-CSFR, CD137 (4-1BB), CD138, CD14, CD15, CD155/PVR (Polio |
| | Virus Receptor), CD16, CD165, CD18, CD1a, CD1b, CD2, CD20, CD21, CD23, CD231, |
| | CD24, CD25/IL-2 Receptor a, CD26/DPP IV, CD29, CD30 (Reed-Sternberg Cell Marker), |
| | CD32/Fcg Receptor II, CD35/CR1, CD36GPIIIb/GPIV, CD3zeta, CD4, CD40, CD42b, |
| | CD43, CD45/T200/LCA, CD45RB, CD45RO, CD46, CD5, CD50/ICAM-3, CD53, |
| | CD54/ICAM-1, CD56/NCAM-1, CD57, CD59/MACIF/MIRL/Protectin, CD6, CD61/ |
| | Platelet Glycoprotein IIIA, CD63, CD68, CD71/Transferrin Receptor, CD79a mb-1, CD79b, |
| | CD8, CD81/TAPA-1, CD84, CD9, CD94, CD95/Fas, CD98, CDC14A Phosphatase, |
| | CDC25C, CDC34, CDC37, CDC47, CDC6, cdh1, Cdk1/p34cdc2, Cdk2, Cdk3, Cdk4, Cdk5, |
| | Cdk7, Cdk8, CDw17, CDw60, CDw75, CDw78, CEA/CD66e, c-erbB-2/HER-2/neu Ab-1 |
| | (21N), c-erbB-4/HER-4, c-fos, Chk1, Chorionic Gonadotropin beta (hCG-beta), |
| | Chromogranin A, CIDE-A, CIDE-B, CITED1, c-jun, Clathrin, claudin 11, Claudin 2, Claudin |
| | 3, Claudin 4, Claudin 5, CLAUDIN 7, Claudin-1, CNPase, Collagen II, Collagen IV, |
| | Collagen IX, Collagen VII, Connexin 43, COX2, CREB, CREB-Binding Protein, |
| | Cryptococcus neoformans, c-Src, Cullin-1 (CUL-1), Cullin-2 (CUL-2), Cullin-3 (CUL-3), |
| | CXCR4/Fusin, Cyclin B1, Cyclin C, Cyclin D1, Cyclin D3, Cyclin E, Cyclin E2, Cystic |
| | Fibrosis Transmembrane Regulator, Cytochrome c, D4-GDI, Daxx, DcR1, DcR2/TRAIL- |
| | R4/TRUNDD, Desmin, DFF40 (DNA Fragmentation Factor 40)/CAD, DFF45/ICAD, |
| | DJ-1, DNA Ligase I, DNA Polymerase Beta, DNA Polymerase Gamma, DNA Primase (p49), |
| | DNA Primase (p58), DNA-PKcs, DP-2, DR3, DR5, Dysferlin, Dystrophin, E2F-1, E2F-2, |
| | E2F-3, E2F-4, E2F-5, E3-binding protein (ARM1), EGFR, EMA/CA15-3/MUC-1, |
| | Endostatin, Epithelial Membrane Antigen (EMA/CA15-3/MUC-1), Epithelial Specific |
| | Antigen, ER beta, ER Ca+2 ATPase2, ERCC1, Erk1, ERK2, Estradiol, Estriol, Estrogen |
| | Receptor, Exo1, Ezrin/p81/80K/Cytovillin, F.VIII/VWF, Factor VIII Related Antigen, FADD |
| | (FAS-Associated death domain-containing protein), Fascin, Fas-ligand, Ferritin, FGF-1, |
| | FGF-2, FHIT, Fibrillin-1, Fibronectin, Filaggrin, Filamin, FITC, Fli-1, FLIP, Flk-1/KDR/ |
| | VEGFR2, Flt-1/VEGFR1, Flt-4, Fra2, FSH, FSH-b, Fyn, Ga0, Gab-1, GABA a Receptor 1, |
| | GAD65, Gai1, Gamma Glutamyl Transferase (gGT), Gamma Glutamylcysteine |
| | Synthetase(GCS)/Glutamate-cysteine Ligase, GAPDH, Gastrin 1, GCDFP-15, G-CSF, |
| | GFAP, Glicentin, Glucagon, Glucose-Regulated Protein 94, GluR 2/3, GluR1, GluR4, |
| | GluR6/7, GLUT-1, GLUT-3, Glycogen Synthase Kinase 3b (GSK3b), Glycophorin A, GM- |
| | CSF, GnRH Receptor, Golgi Complex, Granulocyte, Granzyme B, Grb2, Green Fluorescent |
| | Protein (GFP), GRIP1, Growth Hormone (hGH), GSK-3, GST, GSTmu, H. Pylori, HDAC1, |
| | HDJ-2/DNAJ, Heat Shock Factor 1, Heat Shock Factor 2, Heat Shock Protein 27/hsp27, Heat |
| | Shock Protein 60/hsp60, Heat Shock Protein 70/hsp70, Heat Shock Protein 75/hsp75, Heat |
| | Shock Protein 90a/hsp86, Heat Shock Protein 90b/hsp84, Helicobacter pylori, Heparan |
| | Sulfate Proteoglycan, Hepatic Nuclear Factor-3B, Hepatocyte, Hepatocyte Factor |
| | Homologue-4, Hepatocyte Growth Factor, Heregulin, HIF-1a, Histone H1, hPL, HPV 16, |
| | HPV 16-E7, HRP, Human Sodium Iodide Symporter (hNIS), I-FLICE/CASPER, IFN |
| | gamma, IgA, IGF-1R, IGF-I, IgG, IgM (m-Heavy Chain), I-Kappa-B Kinase b (IKKb), IL-1 |
| | alpha, IL-1 beta, IL-10, IL-10R, IL17, IL-2, IL-3, IL-30, IL-4, IL-5, IL-6, IL-8, Inhibin alpha, |
| | Insulin, Insulin Receptor, Insulin Receptor Substrate-1, Int-2 Oncoprotein, Integrin beta5, |
| | Interferon-a(II), Interferon-g, Involucrin, IP10/CRG2, IPO-38 Proliferation Marker, IRAK, |
| | ITK, JNK Activating kinase (JKK1), Kappa Light Chain, Keratin 10, Keratin 10/13, Keratin |
| | 14, Keratin 15, Keratin 16, Keratin 18, Keratin 19, Keratin 20, Keratin 5/6/18, Keratin 5/8, |
| | Keratin 8, Keratin 8 (phospho-specific Ser73), Keratin 8/18, Keratin (LMW), Keratin (Multi), |
| | Keratin (Pan), Ki67, Ku (p70/p80), Ku (p80), L1 Cell Adhesion Molecule, Lambda Light |
| | Chain, Laminin B1/b1, Laminin B2/g1, Laminin Receptor, Laminin-s, Lck, Lck (p56lck), |
| | Leukotriene (C4, D4, E4), LewisA, LewisB, LH, L-Plastin, LRP/MVP, Luciferase, |
| | Macrophage, MADD, MAGE-1, Maltose Binding Protein, MAP1B, MAP2a,b, MART- |
| | 1/Melan-A, Mast Cell Chymase, Mcl-1, MCM2, MCM5, MDM2, Medroxyprogesterone |
| | Acetate (MPA), Mek1, Mek2, Mek6, Mekk-1, Melanoma (gp100), mGluR1, mGluR5, |
| | MGMT, MHC I (HLA25 and HLA-Aw32), MHC I (HLA-A), MHC I (HLA-A,B,C), MHC I |
| | (HLA-B), MHC II (HLA-DP and DR), MHC II (HLA-DP), MHC II (HLA-DQ), MHC II |
| | (HLA-DR), MHC II (HLA-DR) Ia, Microphthalmia, Milk Fat Globule Membrane Protein, |
| | Mitochondria, MLH1, MMP-1 (Collagenase-I), MMP-10 (Stromilysin-2), MMP-11 |
| | (Stromelysin-3), MMP-13 (Collagenase-3), MMP-14/MT1-MMP, MMP-15/MT2-MMP, |
| | MMP-16/MT3-MMP, MMP-19, MMP-2 (72 kDa Collagenase IV), MMP-23, MMP-7 |
| | (Matrilysin), MMP-9 (92 kDa Collagenase IV), Moesin, mRANKL, Muc-1, Mucin 2, Mucin 3 |
| | (MUC3), Mucin 5AC, MyD88, Myelin/Oligodendrocyte, Myeloid Specific Marker, |
| | Myeloperoxidase, MyoD1, Myogenin, Myoglobin, Myosin Smooth Muscle Heavy Chain, |
| | Nck, Negative Control for Mouse IgG1, Negative Control for Mouse IgG2a, Negative |
| | Control for Mouse IgG3, Negative Control for Mouse IgM, Negative Control for Rabbit IgG, |
| | Neurofilament, Neurofilament (160 kDa), Neurofilament (200 kDa), Neurofilament (68 kDa), |
| | Neuron Specific Enolase, Neutrophil Elastase, NF kappa B/p50, NF kappa B/p65 (Rel A), |
| | NGF-Receptor (p75NGFR), brain Nitric Oxide Synthase (bNOS), endothelial Nitric Oxide |
| | Synthase (eNOS), nm23, NOS-i, NOS-u, Notch, Nucleophosmin (NPM), NuMA, Oct-1, |
| | Oct-2/, Oct-3/, Ornithine Decarboxylase, Osteopontin, p130, p130cas, p14ARF, p15INK4b, |
| | p16INK4a, p170, p170/MDR-1, p18INK4c, p19ARF, p19Skp1, p21WAF1, p27Kip1, p300/ |
| | CBP, p35nck5a, P504S, p53, p57Kip2 Ab-7, p63 (p53 Family Member), p73, p73a, p73a/b, |
| | p95VAV, Parathyroid Hormone, Parathyroid Hormone Receptor Type 1, Parkin, PARP, |
| | PARP (Poly ADP-Ribose Polymerase), Pax-5, Paxillin, PCNA, PCTAIRE2, PDGF, PDGFR |
| | alpha, PDGFR beta, Pds1, Perforin, PGP9.5, PHAS-I, PHAS-II, Phospho-Ser/Thr/Tyr, |
| | Phosphotyrosine, PLAP, Plasma Cell Marker, Plasminogen, PLC gamma 1, PMP-22, |
| | Pneumocystis jiroveci, PPAR-gamma, PR3 (Proteinase 3), Presenillin, Progesterone, |
| | Progesterone Receptor, Progesterone Receptor (phospho-specific) - Serine 190, Progesterone |
| | Receptor (phospho-specific) - Serine 294, Prohibitin, Prolactin, Prolactin Receptor, Prostate |
| | Apoptosis Response Protein-4, Prostate Specific Acid Phosphatase, Prostate Specific |
| | Antigen, pS2, PSCA, Rabies Virus, RAD1, Rad51, Raf1, Raf-1 (Phospho-specific), RAIDD, |
| | Ras, Rad18, Renal Cell Carcinoma, Ret Oncoprotein, Retinoblastoma, Retinoblastoma (Rb) |
| | (Phospho-specific Serine608), Retinoic Acid Receptor (b), Retinoid X Receptor (hRXR), |
| | Retinol Binding Protein, Rhodopsin (Opsin), ROC, RPA/p32, RPA/p70, Ruv A, Ruv B, Ruv |
| | C, S100, S100A4, S100A6, SHP-1, SIM Ag (SIMA-4D3), SIRP a1, sm, SODD (Silencer of |
| | Death Domain), Somatostatin Receptor-I, SRC1 (Steroid Receptor Coactivator-1) Ab-1, |
| | SREBP-1 (Sterol Regulatory Element Binding Protein-1), SRF (Serum Response Factor), |
| | Stat-1, Stat3, Stat5, Stat5a, Stat5b, Stat6, Streptavidin, Superoxide Dismutase, Surfactant |
| | Protein A, Surfactant Protein B, Surfactant Protein B (Pro), Survivin, SV40 Large T Antigen, |
| | Syk, Synaptophysin, Synuclein, Synuclein beta, Synuclein pan, TACE (TNF-alpha |
| | converting enzyme)/ADAM17, TAG-72, tau, TdT, Tenascin, Testosterone, TGF beta 3, |
| | TGF-beta 2, Thomsen-Friedenreich Antigen, Thrombospondin, Thymidine Phosphorylase, |
| | Thymidylate Synthase, Thymine Glycols, Thyroglobulin, Thyroid Hormone Receptor beta, |
| | Thyroid Hormone Receptor, Thyroid Stimulating Hormone (TSH), TID-1, TIMP-1, TIMP-2, |
| | TNF alpha, TNFa, TNR-R2, Topo II beta, Topoisomerase IIa, Toxoplasma Gondii, TR2, |
| | TRADD, Transforming Growth Factor a, Transglutaminase II, TRAP, Tropomyosin, TRP75/ |
| | gp75, TrxR2, TTF-1, Tubulin, Tubulin-a, Tubulin-b, Tyrosinase, Ubiquitin, UCP3, uPA, |
| | Urocortin, Vacular Endothelial Growth Factor(VEGF), Vimentin, Vinculin, Vitamin D |
| | Receptor (VDR), von Hippel-Lindau Protein, Wnt-1, Xanthine Oxidase, XPA, XPF, XPG, |
| | XRCC1, XRCC2, ZAP-70, Zip kinase |
| Known Cancer | ABL1, ABL2, ACSL3, AF15Q14, AF1Q, AF3p21, AF5q31, AKAP9, AKT1, AKT2, |
| Genes | ALDH2, ALK, ALO17, APC, ARHGEF12, ARHH, ARID1A, ARID2, ARNT, ASPSCR1, |
| | ASXL1, ATF1, ATIC, ATM, ATRX, BAP1, BCL10, BCL11A, BCL11B, BCL2, BCL3, |
| | BCL5, BCL6, BCL7A, BCL9, BCOR, BCR, BHD, BIRC3, BLM, BMPR1A, BRAF, |
| | BRCA1, BRCA2, BRD3, BRD4, BRIP1, BTG1, BUB1B, C12orf9, C15orf21, C15orf55, |
| | C16orf75, CANT1, CARD11, CARS, CBFA2T1, CBFA2T3, CBFB, CBL, CBLB, CBLC, |
| | CCNB1IP1, CCND1, CCND2, CCND3, CCNE1, CD273, CD274, CD74, CD79A, CD79B, |
| | CDH1, CDH11, CDK12, CDK4, CDK6, CDKN2A, CDKN2a(p14), CDKN2C, CDX2, |
| | CEBPA, CEP1, CHCHD7, CHEK2, CHIC2, CHN1, CIC, CIITA, CLTC, CLTCL1, |
| | CMKOR1, COL1A1, COPEB, COX6C, CREB1, CREB3L1, CREB3L2, CREBBP, CRLF2, |
| | CRTC3, CTNNB1, CYLD, D10S170, DAXX, DDB2, DDIT3, DDX10, DDX5, DDX6, |
| | DEK, DICER1, DNMT3A, DUX4, EBF1, EGFR, EIF4A2, ELF4, ELK4, ELKS, ELL, ELN, |
| | EML4, EP300, EPS15, ERBB2, ERCC2, ERCC3, ERCC4, ERCC5, ERG, ETV1, ETV4, |
| | ETV5, ETV6, EVI1, EWSR1, EXT1, EXT2, EZH2, FACL6, FAM22A, FAM22B, FAM46C, |
| | FANCA, FANCC, FANCD2, FANCE, FANCF, FANCG, FBXO11, FBXW7, FCGR2B, |
| | FEV, FGFR1, FGFR1OP, FGFR2, FGFR3, FH, FHIT, FIP1L1, FLI1, FLJ27352, FLT3, |
| | FNBP1, FOXL2, FOXO1A, FOXO3A, FOXP1, FSTL3, FUBP1, FUS, FVT1, GAS7, |
| | GATA1, GATA2, GATA3, GMPS, GNA11, GNAQ, GNAS, GOLGA5, GOPC, GPC3, |
| | GPHN, GRAF, HCMOGT-1, HEAB, HERPUD1, HEY1, HIP1, HIST1H4I, HLF, HLXB9, |
| | HMGA1, HMGA2, HNRNPA2B1, HOOK3, HOXA11, HOXA13, HOXA9, HOXC11, |
| | HOXC13, HOXD11, HOXD13, HRAS, HRPT2, HSPCA, HSPCB, IDH1, IDH2, IGH@, |
| | IGK@, IGL@, IKZF1, IL2, IL21R, IL6ST, IL7R, IRF4, IRTA1, ITK, JAK1, JAK2, JAK3, |
| | JAZF1, JUN, KDM5A, KDM5C, KDM6A, KDR, KIAA1549, KIT, KLK2, KRAS, KTN1, |
| | LAF4, LASP1, LCK, LCP1, LCX, LHFP, LIFR, LMO1, LMO2, LPP, LYL1, MADH4, |
| | MAF, MAFB, MALT1, MAML2, MAP2K4, MDM2, MDM4, MDS1, MDS2, MECT1, |
| | MED12, MEN1, MET, MITF, MKL1, MLF1, MLH1, MLL, MLL2, MLL3, MLLT1, |
| | MLLT10, MLLT2, MLLT3, MLLT4, MLLT6, MLLT7, MN1, MPL, MSF, MSH2, MSH6, |
| | MSI2, MSN, MTCP1, MUC1, MUTYH, MYB, MYC, MYCL1, MYCN, MYD88, MYH11, |
| | MYH9, MYST4, NACA, NBS1, NCOA1, NCOA2, NCOA4, NDRG1, NF1, NF2, NFE2L2, |
| | NFIB, NFKB2, NIN, NKX2-1, NONO, NOTCH1, NOTCH2, NPM1, NR4A3, NRAS, |
| | NSD1, NTRK1, NTRK3, NUMA1, NUP214, NUP98, OLIG2, OMD, P2RY8, PAFAH1B2, |
| | PALB2, PAX3, PAX5, PAX7, PAX8, PBRM1, PBX1, PCM1, PCSK7, PDE4DIP, PDGFB, |
| | PDGFRA, PDGFRB, PER1, PHOX2B, PICALM, PIK3CA, PIK3R1, PIM1, PLAG1, PML, |
| | PMS1, PMS2, PMX1, PNUTL1, POU2AF1, POU5F1, PPARG, PPP2R1A, PRCC, PRDM1, |
| | PRDM16, PRF1, PRKAR1A, PRO1073, PSIP2, PTCH, PTEN, PTPN11, RAB5EP, |
| | RAD51L1, RAF1, RALGDS, RANBP17, RAP1GDS1, RARA, RB1, RBM15, RECQL4, |
| | REL, RET, ROS1, RPL22, RPN1, RUNDC2A, RUNX1, RUNXBP2, SBDS, SDH5, SDHB, |
| | SDHC, SDHD, SEPT6, SET, SETD2, SF3B1, SFPQ, SFRS3, SH3GL1, SIL, SLC45A3, |
| | SMARCA4, SMARCB1, SMO, SOCS1, SOX2, SRGAP3, SRSF2, SS18, SS18L1, |
| | SSH3BP1, SSX1, SSX2, SSX4, STK11, STL, SUFU, SUZ12, SYK, TAF15, TAL1, TAL2, |
| | TCEA1, TCF1, TCF12, TCF3, TCF7L2, TCL1A, TCL6, TET2, TFE3, TFEB, TFG, TFPT, |
| | TFRC, THRAP3, TIF1, TLX1, TLX3, TMPRSS2, TNFAIP3, TNFRSF14, TNFRSF17, |
| | TNFRSF6, TOP1, TP53, TPM3, TPM4, TPR, TRA@, TRB@, TRD@, TRIM27, TRIM33, |
| | TRIP11, TSC1, TSC2, TSHR, TTL, U2AF1, USP6, VHL, VTI1A, WAS, WHSC1, |
| | WHSC1L1, WIF1, WRN, WT1, WTX, XPA, XPC, XPO1, YWHAE, ZNF145, ZNF198, |
| | ZNF278, ZNF331, ZNF384, ZNF521, ZNF9, ZRSR2 |
| Known Cancer | AR, androgen receptor; ARPC1A, actin-related protein complex 2/3 subunit A; AURKA, |
| Genes | Aurora kinase A; BAG4, BCl-2 associated anthogene 4; BCl2l2, BCl-2 like 2; BIRC2, |
| | Baculovirus IAP repeat containing protein 2; CACNA1E, calcium channel voltage dependent |
| | alpha-1E subunit; CCNE1, cyclin E1; CDK4, cyclin dependent kinase 4; CHD1L, |
| | chromodomain helicase DNA binding domain 1-like; CKS1B, CDC28 protein kinase 1B; |
| | COPS3, COP9 subunit 3; DCUN1D1, DCN1 domain containing protein 1; DYRK2, dual |
| | specificity tyrosine phosphorylation regulated kinase 2; EEF1A2, eukaryotic elongation |
| | transcription factor 1 alpha 2; EGFR, epidermal growth factor receptor; FADD, Fas- |
| | associated via death domain; FGFR1, fibroblast growth factor receptor 1, GATA6, GATA |
| | binding protein 6; GPC5, glypican 5; GRB7, growth factor receptor bound protein 7; |
| | MAP3K5, mitogen activated protein kinase kinase kinase 5; MED29, mediator complex |
| | subunit 5; MITF, microphthalmia associated transcription factor; MTDH, metadherin; |
| | NCOA3, nuclear receptor coactivator 3; NKX2-1, NK2 homeobox 1; PAK1, |
| | p21/CDC42/RAC1-activated kinase 1; PAX9, paired box gene 9; PIK3CA, |
| | phosphatidylinositol-3 kinase catalytic a; PLA2G10, phopholipase A2, group X; PPM1D, |
| | protein phosphatase magnesium-dependent 1D; PTK6, protein tyrosine kinase 6; PRKCI, |
| | protein kinase C iota; RPS6KB1, ribosomal protein s6 kinase 70 kDa; SKP2, s-phase kinase |
| | associated protein; SMURF1, sMAD specific E3 ubiquitin protein ligase 1; SHH, sonic |
| | hedgehog homologue; STARD3, sTAR-related lipid transfer domain containing protein 3; |
| | YWHAQ, tyrosine 3-monooxygenase/tryptophan 5-monooxygenase activation protein, zeta |
| | isoform; ZNF217, zinc finger protein 217 |
| Mitotic Related | Aurora kinase A (AURKA); Aurora kinase B (AURKB); Baculoviral IAP repeat-containing |
| Cancer Genes | 5, survivin (BIRC5); Budding uninhibited by benzimidazoles 1 homolog (BUB1); Budding |
| | uninhibited by benzimidazoles 1 homolog beta, BUBR1 (BUB1B); Budding uninhibited by |
| | benzimidazoles 3 homolog (BUB3); CDC28 protein kinase regulatory subunit 1B (CKS1B); |
| | CDC28 protein kinase regulatory subunit 2 (CKS2); Cell division cycle 2 (CDC2)/CDK1 |
| | Cell division cycle 20 homolog (CDC20); Cell division cycle-associated 8, borealin |
| | (CDCA8); Centromere protein F, mitosin (CENPF); Centrosomal protein 110 kDa (CEP110); |
| | Checkpoint with forkhead and ring finger domains (CHFR); Cyclin B1 (CCNB1); Cyclin B2 |
| | (CCNB2); Cytoskeleton-associated protein 5 (CKAP5/ch-TOG); Microtubule-associated |
| | protein RP/EB family member 1. End-binding protein 1, EB1 (MAPRE1); Epithelial cell |
| | transforming sequence 2 oncogene (ECT2); Extra spindle poles like 1, separase (ESPL1); |
| | Forkhead box M1 (FOXM1); H2A histone family, member X (H2AFX); Kinesin family |
| | member 4A (KIF4A); Kinetochore-associated 1 (KNTC1/ROD); Kinetochore-associated 2; |
| | highly expressed in cancer 1 (KNTC2/HEC1); Large tumor suppressor, homolog 1 (LATS1); |
| | Large tumor suppressor, homolog 2 (LATS2); Mitotic arrest deficient-like 1; MAD1 |
| | (MAD1L1); Mitotic arrest deficient-like 2; MAD2 (MAD2L1); Mps1 protein kinase (TTK); |
| | Never in mitosis gene a-related kinase 2 (NEK2); Ninein, GSK3b interacting protein (NIN); |
| | Non-SMC condensin I complex, subunit D2 (NCAPD2/CNAP1); Non-SMC condensin I |
| | complex, subunit H (NACPH/CAPH); Nuclear mitotic apparatus protein 1 (NUMA1); |
| | Nucleophosmin (nucleolar phosphoprotein B23, numatrin); (NPM1); Nucleoporin (NUP98); |
| | Pericentriolar material 1 (PCM1); Pituitary tumor-transforming 1, securin (PTTG1); Polo-like |
| | kinase 1 (PLK1); Polo-like kinase 4 (PLK4/SAK); Protein (peptidylprolyl cis/trans |
| | isomerase) NIMA-interacting 1 (PIN1); Protein regulator of cytokinesis 1 (PRC1); RAD21 |
| | homolog (RAD21); Ras association (RalGDS/AF-6); domain family 1 (RASSF1); Stromal |
| | antigen 1 (STAG1); Synuclein-c, breast cancer-specific protein 1 (SNCG, BCSG1); |
| | Targeting protein for Xklp2 (TPX2); Transforming, acidic coiled-coil containing protein 3 |
| | (TACC3); Ubiquitin-conjugating enzyme E2C (UBE2C); Ubiquitin-conjugating enzyme E2I |
| | (UBE2I/UBC9); ZW10 interactor, (ZWINT); ZW10, kinetochore-associated homolog |
| | (ZW10); Zwilch, kinetochore-associated homolog (ZWILCH) |
| Ribonucleoprotein | Argonaute family member, Ago1, Ago2, Ago3, Ago4, GW182 (TNRC6A), TNRC6B, |
| complexes | TNRC6C, HNRNPA2B1, HNRPAB, ILF2, NCL (Nucleolin), NPM1 (Nucleophosmin), |
| | RPL10A, RPL5, RPLP1, RPS12, RPS19, SNRPG, TROVE2, apolipoprotein, apolipoprotein |
| | A, apo A-I, apo A-II, apo A-IV, apo A-V, apolipoprotein B, apo B48, apo B100, |
| | apolipoprotein C, apo C-I, apo C-II, apo C-III, apo C-IV, apolipoprotein D (ApoD), |
| | apolipoprotein E (ApoE), apolipoprotein H (ApoH), apolipoprotein L, APOL1, APOL2, |
| | APOL3, APOL4, APOL5, APOL6, APOLD1 |
| Cytokine Receptors | 4-1BB, ALCAM, B7-1, BCMA, CD14, CD30, CD40 Ligand, CEACAM-1, DR6, Dtk, |
| | Endoglin, ErbB3, E-Selectin, Fas, Flt-3L, GITR, HVEM, ICAM-3, IL-1 R4, IL-1 RI, IL-10 |
| | Rbeta, IL-17R, IL-2Rgamma, IL-21R, LIMPII, Lipocalin-2, L-Selectin, LYVE-1, MICA, |
| | MICB, NRG1-beta1, PDGF Rbeta, PECAM-1, RAGE, TIM-1, TRAIL R3, Trappin-2, uPAR, |
| | VCAM-1, XEDAR |
| Prostate and | ErbB3, RAGE, Trail R3 |
| colorectal cancer | |
| vesicles | |
| Colorectal cancer | IL-1 alpha, CA125, Filamin, Amyloid A |
| vesicles | |
| Colorectal cancer v | Involucrin, CD57, Prohibitin, Thrombospondin, Laminin B1/b1, Filamin, 14.3.3 gamma, |
| adenoma vesicles | 14.3.3 Pan |
| Colorectal | Involucrin, Prohibitin, Laminin B1/b1, IL-3, Filamin, 14.3.3 gamma, 14.3.3 Pan, MMP-15/ |
| adenoma vesicles | MT2-MMP, hPL, Ubiquitin, and mRANKL |
| Brain cancer | Prohibitin, CD57, Filamin, CD18, b-2-Microglobulin, IL-2, IL-3, CD16, p170, Keratin 19, |
| vesicles | Pds1, Glicentin, SRF (Serum Response Factor), E3-binding protein (ARM1), Collagen II, |
| | SRC1 (Steroid Receptor Coactivator-1) Ab-1, Caldesmon, GFAP, TRP75/gp75, alpha-1- |
| | antichymotrypsin, Hepatic Nuclear Factor-3B, PLAP, Tyrosinase, NF kappa B/p50, |
| | Melanoma (gp100), Cyclin E, 6-Histidine, Mucin 3 (MUC3), TdT, CD21, XPA, Superoxide |
| | Dismutase, Glycogen Synthase Kinase 3b (GSK3b), CD54/ICAM-1, Thrombospondin, Gai1, |
| | CD79a mb-1, IL-1 beta, Cytochrome c, RAD1, bcl-X, CD50/ICAM-3, Neurofilament, |
| | Alkaline Phosphatase (AP), ER Ca+2 ATPase2, PCNA, F.VIII/VWF, SV40 Large T Antigen, |
| | Paxillin, Fascin, CD165, GRIP1, Cdk8, Nucleophosmin (NPM), alpha-1-antitrypsin, |
| | CD32/Fcg Receptor II, Keratin 8 (phospho-specific Ser73), DR5, CD46, TID-1, MHC II |
| | (HLA-DQ), Plasma Cell Marker, DR3, Calmodulin, AIF (Apoptosis Inducing Factor), DNA |
| | Polymerase Beta, Vitamin D Receptor (VDR), Bcl10/CIPER/CLAP/mE10, Neuron |
| | Specific Enolase, CXCR4/Fusin, Neurofilament (68 kDa), PDGFR, beta, Growth Hormone |
| | (hGH), Mast Cell Chymase, Ret Oncoprotein, and Phosphotyrosine |
| Melanoma vesicles | Caspase 5, Thrombospondin, Filamin, Ferritin, 14.3.3 gamma, 14.3.3 Pan, CD71/Transferrin |
| | Receptor, and Prostate Apoptosis Response Protein-4 |
| Head and neck | 14.3.3 Pan, Filamin, 14.3.3 gamma, CD71/Transferrin Receptor, CD30, Cdk5, CD138, |
| cancer vesicles | Thymidine Phosphorylase, Ruv 5, Thrombospondin, CD1, Von Hippel-Lindau Protein, |
| | CD46, Rad51, Ferritin, c-Abl, Actin, Muscle Specific, LewisB |
| Membrane proteins | carbonic anhydrase IX, B7, CCCL19, CCCL21, CSAp, HER-2/neu, BrE3, CD1, CD1a, CD2, |
| | CD3, CD4, CD5, CD8, CD11A, CD14, CD15, CD16, CD18, CD19, CD20, CD21, CD22, |
| | CD23, CD25, CD29, CD30, CD32b, CD33, CD37, CD38, CD40, CD40L, CD44, CD45, |
| | CD46, CD52, CD54, CD55, CD59, CD64, CD67, CD70, CD74, CD79a, CD80, CD83, |
| | CD95, CD126, CD133, CD138, CD147, CD154, CEACAM5, CEACAM-6, alpha-fetoprotein |
| | (AFP), VEGF, ED-B fibronectin, EGP-1, EGP-2, EGF receptor (ErbB1), ErbB2, ErbB3, |
| | Factor H, FHL-1, Flt-3, folate receptor, Ga 733, GROB, HMGB-1, hypoxia inducible factor |
| | (HIF), HM1.24, HER-2/neu, insulin-like growth factor (ILGF), IFN-γ, IFN-α, IL-β, IL-2R, |
| | IL-4R, IL-6R, IL-13R, IL-15R, IL-17R, IL-18R, IL-2, IL-6, IL-8, IL-12, IL-15, IL-17, IL-18, |
| | IL-25, IP-10, IGF-1R, Ia, HM1.24, gangliosides, HCG, HLA-DR, CD66a-d, MAGE, mCRP, |
| | MCP-1, MIP-1A, MIP-1B, macrophage migration-inhibitory factor (MIF), MUC1, MUC2, |
| | MUC3, MUC4, MUC5, placental growth factor (P1GF), PSA (prostate-specific antigen), |
| | PSMA, PSMA dimer, PAM4 antigen, NCA-95, NCA-90, A3, A33, Ep-CAM, KS-1, Le(y), |
| | mesothelin, S100, tenascin, TAC, Tn antigen, Thomas-Friedenreich antigens, tumor necrosis |
| | antigens, tumor angiogenesis antigens, TNF-α, TRAIL receptor (R1 and R2), VEGFR, |
| | RANTES, T101, cancer stem cell antigens, complement factors C3, C3a, C3b, C5a, C5 |
| Cluster of | CD1, CD2, CD3, CD4, CD5, CD6, CD7, CD8, CD9, CD10, CD11a, CD11b, CD11c, |
| Differentiation | CD12w, CD13, CD14, CD15, CD16, CDw17, CD18, CD19, CD20, CD21, CD22, CD23, |
| (CD) proteins | CD24, CD25, CD26, CD27, CD28, CD29, CD30, CD31, CD32, CD33, CD34, CD35, CD36, |
| | CD37, CD38, CD39, CD40, CD41, CD42, CD43, CD44, CD45, CD46, CD47, CD48, |
| | CD49a, CD49b, CD49c, CD49d, CD49e, CD49f, CD53, CD54, CD55, CD56, CD57, CD58, |
| | CD59, CD61, CD62E, CD62L, CD62P, CD63, CD68, CD69, CD71, CD72, CD73, CD74, |
| | CD80, CD81, CD82, CD83, CD86, CD87, CD88, CD89, CD90, CD91, CD95, CD96, |
| | CD100, CD103, CD105, CD106, CD107, CD107a, CD107b, CD109, CD117, CD120, |
| | CD127, CD133, CD134, CD135, CD138, CD141, CD142, CD143, CD144, CD147, CD151, |
| | CD152, CD154, CD156, CD158, CD163, CD165, CD166, CD168, CD184, CDw186, |
| | CD195, CD197, CD209, CD202a, CD220, CD221, CD235a, CD271, CD303, CD304, |
| | CD309, CD326 |
| Interleukin (IL) | IL-1, IL-2, IL-3, IL-4, IL-5, IL-6, IL-7, IL-8 or CXCL8, IL-9, IL-10, IL-11, IL-12, IL-13, IL- |
| proteins | 14, IL-15, IL-16, IL-17, IL-18, IL-19, IL-20, IL-21, IL-22, IL-23, IL-24, IL-25, IL-26, IL-27, |
| | IL-28, IL-29, IL-30, IL-31, IL-32, IL-33, IL-35, IL-36 |
| IL receptors | CD121a/IL1R1, CD121b/IL1R2, CD25/IL2RA, CD122/IL2RB, CD132/IL2RG, |
| | CD123/IL3RA, CD131/IL3RB, CD124/IL4R, CD132/IL2RG, CD125/IL5RA, |
| | CD131/IL3RB, CD126/IL6RA, CD130/IR6RB, CD127/IL7RA, CD132/IL2RG, |
| | CXCR1/IL8RA, CXCR2/IL8RB/CD128, CD129/IL9R, CD210/IL10RA, |
| | CDW210B/IL10RB, IL11RA, CD212/IL12RB1, IR12RB2, IL13R, IL15RA, CD4, |
| | CDw217/IL17RA, IL17RB, CDw218a/IL18R1, IL20R, IL20R, IL21R, IL20R, IL23R, |
| | IL20R, LY6E, IL20R1, IL27RA, IL28R, IL31RA |
| Mucin (MUC) | MUC1, MUC2, MUC3A, MUC3B, MUC4, MUC5AC, MUC5B, MUC6, MUC7, MUC8, |
| proteins | MUC12, MUC13, MUC15, MUC16, MUC17, MUC19, and MUC20 |
| MUC1 isoforms | mucin-1 isoform 2 precursor or mature form (NP_001018016.1), mucin-1 isoform 3 |
| | precursor or mature form (NP_001018017.1), mucin-1 isoform 5 precursor or mature form |
| | (NP_001037855.1), mucin-1 isoform 6 precursor or mature form (NP_001037856.1), mucin- |
| | 1 isoform 7 precursor or mature form (NP_001037857.1), mucin-1 isoform 8 precursor or |
| | mature form (NP_001037858.1), mucin-1 isoform 9 precursor or mature form |
| | (NP_001191214.1), mucin-1 isoform 10 precursor or mature form (NP_001191215.1), |
| | mucin-1 isoform 11 precursor or mature form (NP_001191216.1), mucin-1 isoform 12 |
| | precursor or mature form (NP_001191217.1), mucin-1 isoform 13 precursor or mature form |
| | (NP_001191218.1), mucin-1 isoform 14 precursor or mature form (NP_001191219.1), |
| | mucin-1 isoform 15 precursor or mature form (NP_001191200.1), mucin-1 isoform 16 |
| | precursor or mature form (NP_001191201.1), mucin-1 isoform 17 precursor or mature form |
| | (NP_001191202.1), mucin-1 isoform 18 precursor or mature form (NP_001191203.1), |
| | mucin-1 isoform 19 precursor or mature form (NP_001191204.1), mucin-1 isoform 20 |
| | precursor or mature form (NP_001191205.1), mucin-1 isoform 21 precursor or mature form |
| | (NP_001191206.1), mucin-1 isoform 1 precursor or mature form (NP_002447.4), |
| | ENSP00000357380, ENSP00000357377, ENSP00000389098, ENSP00000357374, |
| | ENSP00000357381, ENSP00000339690, ENSP00000342814, ENSP00000357383, |
| | ENSP00000357375, ENSP00000338983, ENSP00000343482, ENSP00000406633, |
| | ENSP00000388172, ENSP00000357378, P15941-1, P15941-2, P15941-3, P15941-4, |
| | P15941-5, P15941-6, P15941-7, P15941-8, P15941-9, P15941-10, secreted isoform, |
| | membrane bound isoform, CA 27.29 (BR 27.29), CA 15-3, PAM4 reactive antigen, |
| | underglycosylated isoform, unglycosylated isoform, CanAg antigen |
| MUC1 interacting | ABL1, SRC, CTNND1, ERBB2, GSK3B, JUP, PRKCD, APC, GALNT1, GALNT10, |
| proteins | GALNT12, JUN, LCK, OSGEP, ZAP70, CTNNB1, EGFR, SOS1, ERBB3, ERBB4, GRB2, |
| | ESR1, GALNT2, GALNT4, LYN, TP53, C1GALT1, C1GALT1C1, GALNT3, GALNT6, |
| | GCNT1, GCNT4, MUC12, MUC13, MUC15, MUC17, MUC19, MUC2, MUC20, MUC3A, |
| | MUC4, MUC5B, MUC6, MUC7, MUCL1, ST3GAL1, ST3GAL3, ST3GAL4, |
| | ST6GALNAC2, B3GNT2, B3GNT3, B3GNT4, B3GNT5, B3GNT7, B4GALT5, GALNT11, |
| | GALNT13, GALNT14, GALNT5, GALNT8, GALNT9, ST3GAL2, ST6GAL1, |
| | ST6GALNAC4, GALNT15, MYOD1, SIGLEC1, IKBKB, TNFRSF1A, IKBKG, MUC1 |
| Tumor markers | Alphafetoprotein (AFP), Carcinoembryonic antigen (CEA), CA-125, MUC-1, Epithelial |
| | tumor antigen (ETA), Tyrosinase, Melanoma-associated antigen (MAGE), p53 |
| Tumor markers | Alpha fetoprotein (AFP), CA15-3, CA27-29, CA19-9, CA-125, Calretinin, |
| | Carcinoembryonic antigen, CD34, CD99, CD117, Chromogranin, Cytokeratin (various |
| | types), Desmin, Epithelial membrane protein (EMA), Factor VIII, CD31 FL1, Glial fibrillary |
| | acidic protein (GFAP), Gross cystic disease fluid protein (GCDFP-15), HMB-45, Human |
| | chorionic gonadotropin (hCG), immunoglobulin, inhibin, keratin (various types), PTPRC |
| | (CD45), lymphocyte marker (various types, MART-1 (Melan-A), Myo D1, muscle-specific |
| | actin (MSA), neurofilament, neuron-specific enolase (NSE), placental alkaline phosphatase |
| | (PLAP), prostate-specific antigen, S100 protein, smooth muscle actin (SMA), synaptophysin, |
| | thyroglobulin, thyroid transcription factor-1, Tumor M2-PK, vimentin |
| Cell adhesion | Immunoglobulin superfamily CAMs (IgSF CAMs), N-CAM (Myelin protein zero), ICAM (1, |
| molecule (CAMs) | 5), VCAM-1, PE-CAM, L1-CAM, Nectin (PVRL1, PVRL2, PVRL3), Integrins, LFA-1 |
| | (CD11a + CD18), Integrin alphaXbeta2 (CD11c + CD18), Macrophage-1 antigen |
| | (CD11b + CD18), VLA-4 (CD49d + CD29), Glycoprotein IIb/IIIa (ITGA2B + ITGB3), |
| | Cadherins, CDH1, CDH2, CDH3, Desmosomal, Desmoglein (DSG1, DSG2, DSG3, DSG4), |
| | Desmocollin (DSC1, DSC2, DSC3), Protocadherin, PCDH1, T-cadherin, CDH4, CDH5, |
| | CDH6, CDH8, CDH11, CDH12, CDH15, CDH16, CDH17, CDH9, CDH10, Selectins, E- |
| | selectin, L-selectin, P-selectin, Lymphocyte homing receptor: CD44, L-selectin, integrin |
| | (VLA-4, LFA-1), Carcinoembryonic antigen (CEA), CD22, CD24, CD44, CD146, CD164 |
| Annexins | ANXA1; ANXA10; ANXA11; ANXA13; ANXA2; ANXA3; ANXA4; ANXA5; ANXA6; |
| | ANXA7; ANXA8; ANXA8L1; ANXA8L2; ANXA9 |
| Cadherins | CDH1, CDH2, CDH12, CDH3, Deomoglein, DSG1, DSG2, DSG3, DSG4, Desmocollin, |
| (“calcium- | DSC1, DSC2, DSC3, Protocadherins, PCDH1, PCDH10, PCDH11x, PCDH11y, PCDH12, |
| dependent | FAT, FAT2, FAT4, PCDH15, PCDH17, PCDH18, PCDH19; PCDH20; PCDH7, PCDH8, |
| adhesion”) | PCDH9, PCDHA1, PCDHA10, PCDHA11, PCDHA12, PCDHA13, PCDHA2, PCDHA3, |
| | PCDHA4, PCDHA5, PCDHA6, PCDHA7, PCDHA8, PCDHA9, PCDHAC1, PCDHAC2, |
| | PCDHB1, PCDHB10, PCDHB11, PCDHB12, PCDHB13, PCDHB14, PCDHB15, |
| | PCDHB16, PCDHB17, PCDHB18, PCDHB2, PCDHB3, PCDHB4, PCDHB5, PCDHB6, |
| | PCDHB7, PCDHB8, PCDHB9, PCDHGA1, PCDHGA10, PCDHGA11, PCDHGA12, |
| | PCDHGA2; PCDHGA3, PCDHGA4, PCDHGA5, PCDHGA6, PCDHGA7, PCDHGA8, |
| | PCDHGA9, PCDHGB1, PCDHGB2, PCDHGB3, PCDHGB4, PCDHGB5, PCDHGB6, |
| | PCDHGB7, PCDHGC3, PCDHGC4, PCDHGC5, CDH9 (cadherin 9, type 2 (T1-cadherin)), |
| | CDH10 (cadherin 10, type 2 (T2-cadherin)), CDH5 (VE-cadherin (vascular endothelial)), |
| | CDH6 (K-cadherin (kidney)), CDH7 (cadherin 7, type 2), CDH8 (cadherin 8, type 2), |
| | CDH11 (OB-cadherin (osteoblast)), CDH13 (T-cadherin-H-cadherin (heart)), CDH15 (M- |
| | cadherin (myotubule)), CDH16 (KSP-cadherin), CDH17 (LI cadherin (liver-intestine)), |
| | CDH18 (cadherin 18, type 2), CDH19 (cadherin 19, type 2), CDH20 (cadherin 20, type 2), |
| | CDH23 (cadherin 23, (neurosensory epithelium)), CDH10, CDH11, CDH13, CDH15, |
| | CDH16, CDH17, CDH18, CDH19, CDH20, CDH22, CDH23, CDH24, CDH26, CDH28, |
| | CDH4, CDH5, CDH6, CDH7, CDH8, CDH9, CELSR1, CELSR2, CELSR3, CLSTN1, |
| | CLSTN2, CLSTN3, DCHS1, DCHS2, LOC389118, PCLKC, RESDA1, RET |
| ECAD (CDH1) | SNAI1/SNAIL, ZFHX1B/SIP1, SNAI2/SLUG, TWIST1, DeltaEF1 |
| downregulators | |
| ECAD | AML1, p300, HNF3 |
| upregulators | |
| ECAD interacting | ACADVL, ACTG1, ACTN1, ACTN4, ACTR3, ADAM10, ADAM9, AJAP1, ANAPC1, |
| proteins | ANAPC11, ANAPC4, ANAPC7, ANK2, ANP32B, APC2, ARHGAP32, ARPC2, ARVCF, |
| | BOC, C1QBP, CA9, CASP3, CASP8, CAV1, CBLL1, CCNB1, CCND1, CCT6A, CDC16, |
| | CDC23, CDC26, CDC27, CDC42, CDH2, CDH3, CDK5R1, CDON, CDR2, CFTR, |
| | CREBBP, CSE1L, CSNK2A1, CTNNA1, CTNNB1, CTNND1, CTNND2, DNAJA1, DRG1, |
| | EGFR, EP300, ERBB2, ERBB2IP, ERG, EZR, FER, FGFR1, FOXM1, FRMD5, FYN, |
| | GBAS, GNA12, GNA13, GNB2L1, GSK3B, HDAC1, HDAC2, HSP90AA1, HSPA1A, |
| | HSPA1B, HSPD1, IGHA1, IQGAP1, IRS1, ITGAE, ITGB7, JUP, KIFC3, KLRG1, KRT1, |
| | KRT9, LIMA1, LMNA, MAD2L2, MAGI1, MAK, MDM2, MET, MYO6, MYO7A, |
| | NDRG1, NEDD9, NIPSNAP1, NKD2, PHLPP1, PIP5K1C, PKD1, PKP4, PLEKHA7, |
| | POLR2E, PPP1CA, PRKD1, PSEN1, PTPN1, PTPN14, PTPRF, PTPRM, PTPRQ, PTTG1, |
| | PVR, PVRL1, RAB8B, RRM2, SCRIB, SET, SIX1, SKI, SKP2, SRC, TACC3, TAS2R13, |
| | TGM2, TJP1, TK1, TNS3, TTK, UBC, USP9X, VCL, VEZT, XRCC5, YAP1, YES1, |
| | ZC3HC1 |
| Epithelial- | SERPINA3, ACTN1, AGR2, AKAP12, ALCAM, AP1M2, AXL, BSPRY, CCL2, CDH1, |
| mesenchymal | CDH2, CEP170, CLDN3, CLDN4, CNN3, CYP4X1, DNMT3A, DSG3, DSP, EFNB2, EHF, |
| transition (EMT) | ELF3, ELF5, ERBB3, ETV5, FLRT3, FOSB, FOSL1, FOXC1, FX YD 5, GPDIL, HMGA1, |
| | HMGA2, HOPX, IFI16, IGFBP2, IHH, IKBIP, IL-11, IL-18, IL6, IL8, ITGA5, ITGB3, |
| | LAMBl, LCN2, MAP7, MB, MMP7, MMP9, MPZL2, MSLN, MTA3, MTSS1, OCLN, |
| | PCOLCE2, PECAM1, PLAUR, PLXNB1, PPL, PPP1R9A, RASSF8, SCNN1A, SERPINB2, |
| | SERPINE1, SFRP1, SH3YL1, SLC27A2, SMAD7, SNAI1, SNAI2, SPARC, SPDEF, SRPX, |
| | STAT5A, TBX2, TJP3, TMEM125, TMEM45B, TWIST1, VCAN, VIM, VWF, XBP1, |
| | YBX1, ZBTB10, ZEB1, ZEB2 |
| Vesicle Associated | ALB, C3, A2M, TF, APOB, KRT1, KRT10, FGA, IGHG1, SERPINA1, FGB, KRT2, HP, |
| | IGHG3, IGHA1, SERPINA3, C4A, IGKC, C4B, CP, IGHM, FGG, KRT9, IGHG2, FN1, |
| | CFH, SERPINC1, C4A, APOA1, GC, Ig mu heavy chain disease protein, IGHG4, HPX, |
| | IGHA2, IGLC2, ITIH1, KNG1, ITIH4, ITIH2, AGT, PLG, APOA4, KRT14, CFB, IGLC1, |
| | ITIH4, ORM1, ITIH4, AHSG, A1BG, IGLL5, SERPING1, Ig kappa chain V-I region DEE, |
| | APOE, Ig kappa chain V-I region OU, ORM2, AFM, Ig heavy chain V-III region BUT, |
| | C4BPA, KRT6A, SERPINF1, APCS, APOH, CLU, KRT5, Ig heavy chain V-III region BRO, |
| | Ig heavy chain V-III region GAL, HRG, Ig heavy chain V-III region CAM, VTN, |
| | SERPIND1, TTR, PON1, Ig heavy chain V-III region TIL, C1QC, SERPINA7, Ig kappa |
| | chain V-I region CAR, Ig kappa chain V-IV region Len, AMBP, KRT13, Ig kappa chain V- |
| | III region SIE, SERPINF2, Ig heavy chain V-III region VH26, C5, F2, IGKV4-1, C7, Ig |
| | kappa chain V-I region EU, Ig kappa chain V-III region NG9 (Fragment), GSN, LPA, LYZ, |
| | Ig kappa chain V-III region HAH, Ig lambda chain V-III region LOI, SERPINA6, AZGP1, |
| | CIS, CFHR1, C9, HRNR, APOL1, C1QB, Ig kappa chain V-I region Ni, Ig heavy chain V- |
| | III region WEA, Ig kappa chain V-II region TEW, SERPINA4, DCD, LRG1, GSN, RBP4, |
| | SMC3, PRSS3, IGJ, C6, SEPP1, HBA1, Ig kappa chain V-III region CLL, ABCF1, APOD, |
| | SERPINA5, PDE4D, C2, C8A, C1R, CD5L, CFHR2, FLG2, HBB, CFI, Ig kappa chain V-II |
| | region MIL, Ig heavy chain V-II region NEWM, C8G, Ig lambda chain V-III region SH, |
| | PGLYRP2, SBSN, Ig lambda chain V-I region WAH, Ig lambda chain V-IV region Hil, |
| | SAA4, F10, MASP1, SHROOM3, F13A1, Ig lambda chain V region 4A, GIT2, KLKB1, |
| | ATRN, Ig heavy chain V-I region HG3, ITIH3, CDK10, APOA2, Ig heavy chain V-II region |
| | OU, Ig heavy chain V-I region V35, UTF1, MAP1B, PAPLN, Ig kappa chain V-I region Lay, |
| | RNF207, VPS13D, CRYGN, HMCN1, SLC27A6, FN1, VWF, C8B, LGALS3BP, HP, |
| | PROS1, ECM1, HPR, LBP, HABP2, FCN2, KRT77, APOM, Ig kappa chain V-I region |
| | WEA, GC, PLA2G7, Ig kappa chain V-I region Scw, CFP, APOM, MASP1, IGKV1-5, F12, |
| | SERPINA1, F13B, FCN2, PCYOX1, C4BPB, LCAT, KRT73, Ig heavy chain V-III region |
| | GA, Ig kappa chain V-III region VG (Fragment), MBL2, EEF2, MAP3K6, EPHA5, APOC4, |
| | CAMP, SERPINA10, FCGBP, PCSK9, CPB2, CFHR5, SAFB2, C2CD4C, F5, NUP153, |
| | XYLT1, EP300, BMP8A, N4BP2, KRT4, KRT16, Ig kappa chain V-III region B6, KRT86, |
| | KRT85, ANXA1, KRT78, SPRR2E, CLU, CRNN, ARHGEF17, SPRR3, FN1, ARHGAP30, |
| | ACTG2, SFTPA1, CDC5L, FN1, IGLC7, FLG, SERPINA1, Ig heavy chain V-III region |
| | TUR, JUP, DSP, KNG1, KPRP, LCE1C, Ig heavy chain V-II region ARH-77, Ig kappa chain |
| | V-III region POM, FBLN1, C1QA, FCN3, Ig lambda chain V-IV region Bau, Ig lambda |
| | chain V-VI region WLT, UPF3A, SERPINF2, XIRP2, CFB, SERPINA3, DSG1, TTN, |
| | LRRCC1, MYO15A, ANKRD28, Ig heavy chain V-III region HIL, KIT, DNMT1, PLXND1, |
| | Ig kappa chain V-I region Mev, IGHD, RCBTB1, BCO1, KRT6B, KRT13, Ig kappa chain V- |
| | II region RPMI 6410, Ig kappa chain V-IV region B17, ACTB, FN1, SARDH, GK, EMC4, |
| | MED30, PIGR, HSPB1, DSP, VEPH1, SNX27, LRRC53, SIGLEC16, F9, Ig heavy chain V- |
| | III region TRO, APOC3, TOP2A, FLYWCH1, ACTL10 |
| Vesicle Associated | KRT6A, DSP, KRT6B, ACTB, FLG, IVL, SFN, KRT77, LMNA, KRT15, LGALS7, |
| | HSPA8, EPPK1, HSPA1A, DSG1, GSN, HIST1H2BK, EEF1A1, RPLP2, KRT74, YWHAB, |
| | PKP1, JUP, HNRNPA1, HSP90AA1, HIST1H2AH, GAPDH, HIST1H1E, HSPB1, |
| | CALML5, DCD, YWHAQ, VCP, AHNAK, SFPQ, PLEC, SERBP1, P4HB, PPL, Ig lambda |
| | chain V-IV region Hil, EIF3B, HSPA5, C3, TUBB4A, IGHG1, RPS3A, PPIA, SPTBN2, |
| | PDIA3, KRT80, DBNL, RPL29, RPL3, ANXA2P2, TPI1, RDX, H1F0, PGAM2, IGLC2, |
| | EVPL, ENO1, HNRNPA2B1, RPL7A, MYL6, ANXA1, TRIM29, RPS19, POF1B, RPL6, |
| | MORC2, RTN4, CA/CK E, LYZ, ZDBF2, IGKC, Ig heavy chain V-III region TIL, C4BPA, |
| | ACTB, LCE1C, IGHG3, SHOX2, KRT17, KRT77, KRT80, PIGR, KNG1, DSG1, DSP, |
| | SHROOM3, FGA, KPRP, DUSP27, LCE1C, SARDH, LYZ, SHISA5, HSP90AB1, EEF1A1, |
| | FGB, SHROOM3, IGLC2, KRT85, BMP8A, LCE2B, KRT6A, IGKC, S100A9, EEF1A1, |
| | C3, DCD, S100A8, LCE1C, ALB, IGLC2, S100A9, HSP90AB1, ACTB, KRT5, Ig kappa |
| | chain V-II region MIL, HRNR, IGHG1, HIST1H4A, DEFA1, LYZ, C3, SHROOM3, Ig |
| | kappa chain V-IV region STH (Fragment), Ig lambda chain V-I region HA, IGHA2, SARDH, |
| | H3F3C, LTF, TF |
| Vesicle Associated | C3, A2M, APOB, IGKC, C4A, C4B, FGB, ALB, CFH, IGHG1, FGA, FN1, PLG, IGHM, |
| | FGG, TF, C5, CP, IGHG2, IGLC2, Ig mu heavy chain disease protein, ITIH1, PZP, IGHG3, |
| | IGLL5, HP, C4BPA, ITIH2, IGHA1, KRT1, KRT10, APOE, Ig kappa chain V-I region DEE, |
| | AMBP, F2, C7, C6, ITIH4, CFB, IGHG4, APOH, APOA1, CD5L, C1R, HPR, Ig kappa |
| | chain V-I region Scw, IGHA2, CFHR1, KRT2, Ig kappa chain V-III region SIE, HRG, Ig |
| | heavy chain V-III region BRO, C1QB, GC, Ig heavy chain V-III region TIL, Ig kappa chain |
| | V-III region NG9 (Fragment), Ig heavy chain V-III region BUT, Ig heavy chain V-III region |
| | TUR, C9, SERPIND1, Ig kappa chain V-I region WEA, Ig kappa chain V-I region Ni, Ig |
| | kappa chain V-IV region Len, Ig kappa chain V-I region EU, Ig kappa chain V-II region |
| | TEW, Ig heavy chain V-III region GAL, KNG1, VTN, C8B, Ig lambda chain V-III region |
| | LOI, Ig heavy chain V-II region NEWM, APCS, KLKB1, CFI, PROS1, LPA, KRT9, |
| | SERPINA1, Ig lambda chain V-III region SH, C8A, Ig kappa chain V-III region B6, Ig |
| | lambda chain V-IV region Hil, Ig kappa chain V-III region CLL, C1S, FCN3, SERPINC1, Ig |
| | kappa chain V-I region Mev, IGHD, C1QC, HPX, C8G, IGKV1-5, Ig kappa chain V-I region |
| | Wes, Ig heavy chain V-III region WEA, A1BG, GSN, FBLN1, HBB, ITIH3, F12, |
| | SERPINA3, APOC3, Ig kappa chain V-I region BAN, Ig kappa chain V-III region VH |
| | (Fragment), F13B, IGKV4-1, SERPINF2, CLU, HIST1H1D, PON1, IGJ, Ig kappa chain V- |
| | III region POM, Ig heavy chain V-III region CAM, Ig heavy chain V-III region BUR, Ig |
| | kappa chain V-III region VG (Fragment), APOD, Ig lambda chain V-IV region MOL, Ig |
| | heavy chain V-III region GAR, FCGBP, APOM, F13A1, Ig heavy chain V-I region HG3, |
| | C1QA, Ig lambda chain V-VI region WLT, C2, C4BPB, CFP, SERPINA4, SAA4, |
| | SERPINF1, LGALS3BP, HABP2, RCBTB1, APOL1, KCNQ2, F9, Ig heavy chain V-III |
| | region TRO, Ig heavy chain V-III region HIL, Ig heavy chain V-II region OU, APOA2, F11, |
| | Ig lambda chain V-I region WAH, Ig lambda chain V region 4A, Ig kappa chain V-II region |
| | RPMI 6410, Ig kappa chain V-III region IARC/BL41, KRT5, IGLL1, Ig heavy chain V-I |
| | region V35, HBA1, ADIPOQ, PGLYRP2, UPF3A, BCO1, ARFGAP3, SARDH, SERPINA1, |
| | KNG1, Ig kappa chain V-I region Kue, Ig kappa chain V-I region Lay, Ig kappa chain V-I |
| | region OU, Ig kappa chain V-II region MIL, Ig heavy chain V-III region VH26, Ig heavy |
| | chain V-III region GA, FN1, TTR, SERPING1, APOA4, PRSS1, ANXA6, CFTR, LBP, |
| | FBLN1, SPAG17, PDLIM2, ARHGEF17, IGLC7, AGRN, AGT, RBP4, AHSG, Ig kappa |
| | chain V-III region GOL, SERPINA5, GSN, Ig kappa chain V-III region HAH, CFHR2, |
| | GIT2, INCENP |
| Vesicle Associated | MUC5B, FABP5, HPX, CP, SPRR2E, SPRR2D, PDE4D, GC, CPD, CD14, LAP3, |
| | AFM, FCN2, DMBT1, LIFR, SNX27, LCN1, ARFIP1, APOH, KLKB1, XP32, |
| | H2AFV, KRT75, KRT6C, KRT83, KRT76, KRT33B, KRT72, KRT31, KRT73, |
| | DSG1, LCE1C, LCE1A, CFB, CFH, SERPINA1, Ig kappa chain V-I region EU, Ig |
| | kappa chain V-II region MIL, Ig lambda chain V-IV region Bau, Ig heavy chain V- |
| | III region GAL, IGLC6, ACTG2 |

[0314] Examples of additional biomarkers that can be incorporated into the methods and compositions of the invention include without limitation those disclosed in International Patent Application Nos. PCT/US2012/042519 (WO 2012/174282), filed Jun. 14, 2012 and PCT/US2012/050030 (WO 2013/022995), filed Aug. 8, 2012.

[0315] In various embodiments of the invention, the biomarkers or biosignature used to detect or assess any of the conditions or diseases disclosed herein can comprise one or more biomarkers in one of several different categories of markers, wherein the categories include without limitation one or more of: 1) disease specific biomarkers; 2) cell- or tissue-specific biomarkers; 3) vesicle-specific markers (e.g., general vesicle biomarkers); 4. angiogenesis-specific biomarkers; and 5) immunomodulatory biomarkers. Examples of all such markers are disclosed herein and known to a person having ordinary skill in the art. Furthermore, a biomarker known in the art that is characterized to have a role in a particular disease or condition can be adapted for use as a target in compositions and methods of the invention. In further embodiments, such biomarkers that are associated with vesicles can be all vesicle surface markers, or a combination of vesicle surface markers and vesicle payload markers (i.e., molecules enclosed by a vesicle). The biomarkers assessed can be from a combination of sources. For example, a disease or disorder may be detected or characterized by assessing a combination of proteins, nucleic acids, vesicles, circulating biomarkers, biomarkers from a tissue sample, and the like. In addition, as noted herein, the biological sample assessed can be any biological fluid, or can comprise individual components present within such biological fluid (e.g., vesicles, nucleic acids, proteins, or complexes thereof).

[0316] EpCAM is a pan-epithelial differentiation antigen that is expressed on many tumor cells. It is intricately linked with the Cadherin-Catenin pathway and hence the fundamental WNT pathway responsible for intracellular signalling and polarity. It has been used as an immunotherapeutic target in the treatment of gastrointestinal, urological and other carcinomas. (Chaudry M A, Sales K, Ruf P, Lindhofer H, Winslet M C (April 2007). Br. J Cancer 96 (7): 1013-9.). It is expressed in undifferentiated pluripotent stem cells. EpCAM is a member of a family that includes at least two type I membrane proteins and functions as a homotypic calcium-independent cell adhesion molecule. Mutations in this gene result in congenital tufting enteropathy. EpCAM has been observed on the surface of microvesicles derived from cancer cell of various lineages. EpCAM is used as an exemplary surface antigen in various examples herein. One of skill will appreciate that various embodiments and examples using EpCAM can be applied to other microvesicle surface antigens as well.

### Therapeutics

[0317] As used herein “therapeutically effective amount” refers to an amount of a composition that relieves (to some extent, as judged by a skilled medical practitioner) one or more symptoms of the disease or condition in a mammal. Additionally, by “therapeutically effective amount” of a composition is meant an amount that returns to normal, either partially or completely, physiological or biochemical parameters associated with or causative of a disease or condition. A clinician skilled in the art can determine the therapeutically effective amount of a composition in order to treat or prevent a particular disease condition, or disorder when it is administered, such as intravenously, subcutaneously, intraperitoneally, orally, or through inhalation. The precise amount of the composition required to be therapeutically effective will depend upon numerous factors, e.g., such as the specific activity of the active agent, the delivery device employed, physical characteristics of the agent, purpose for the administration, in addition to many patient specific considerations. But a determination of a therapeutically effective amount is within the skill of an ordinarily skilled clinician upon the appreciation of the disclosure set forth herein.

[0318] The terms “treating,” “treatment,” “therapy,” and “therapeutic treatment” as used herein refer to curative therapy, prophylactic therapy, or preventative therapy. An example of “preventative therapy” is the prevention or lessening the chance of a targeted disease (e.g., cancer or other proliferative disease) or related condition thereto. Those in need of treatment include those already with the disease or condition as well as those prone to have the disease or condition to be prevented. The terms “treating,” “treatment,” “therapy,” and “therapeutic treatment” as used herein also describe the management and care of a mammal for the purpose of combating a disease, or related condition, and includes the administration of a composition to alleviate the symptoms, side effects, or other complications of the disease, condition. Therapeutic treatment for cancer includes, but is not limited to, surgery, chemotherapy, radiation therapy, gene therapy, and immunotherapy.

[0319] As used herein, the term “agent” or “drug” or “therapeutic agent” refers to a chemical compound, a mixture of chemical compounds, a biological macromolecule, or an extract made from biological materials such as bacteria, plants, fungi, or animal (particularly mammalian) cells or tissues that are suspected of having therapeutic properties. The agent or drug can be purified, substantially purified or partially purified. An “agent” according to the present invention, also includes a radiation therapy agent or a “chemotherapeutic agent.”

[0320] As used herein, the term “diagnostic agent” refers to any chemical used in the imaging of diseased tissue, such as, e.g., a tumor.

[0321] As used herein, the term “chemotherapeutic agent” refers to an agent with activity against cancer, neoplastic, and/or proliferative diseases, or that has ability to kill cancerous cells directly.

[0322] As used herein, “pharmaceutical formulations” include formulations for human and veterinary use with no significant adverse toxicological effect. “Pharmaceutically acceptable formulation” as used herein refers to a composition or formulation that allows for the effective distribution of the nucleic acid molecules of the instant invention in the physical location most suitable for their desired activity.

[0323] As used herein the term “pharmaceutically acceptable carrier” is intended to include any and all solvents, dispersion media, coatings, antibacterial and antifungal agents, isotonic and absorption delaying agents, and the like, compatible with pharmaceutical administration. The use of such media and agents for pharmaceutically active substances is well known in the art. Except insofar as any conventional media or agent is incompatible with the active compound, use thereof in the compositions is contemplated.

[0324] Aptamer-Toxin Conjugates as a Cancer Therapeutic

[0325] Extensive previous work has developed the concept of antibody-toxin conjugates (“immunoconjugates”) as potential therapies for a range of indications, mostly directed at the treatment of cancer with a primary focus on hematological tumors. A variety of different payloads for targeted delivery have been tested in pre-clinical and clinical studies, including protein toxins, high potency small molecule cytotoxics, radioisotopes, and liposome-encapsulated drugs. While these efforts have successfully yielded three FDA-approved therapies for hematological tumors, immunoconjugates as a class (especially for solid tumors) have historically yielded disappointing results that have been attributable to multiple different properties of antibodies, including tendencies to develop neutralizing antibody responses to non-humanized antibodies, limited penetration in solid tumors, loss of target binding affinity as a result of toxin conjugation, and imbalances between antibody half-life and toxin conjugate half-life that limit the overall therapeutic index (reviewed by Reff and Heard, Critical Reviews in Oncology/Hematology, 40 (2001):25-35).

[0326] Aptamers are functionally similar to antibodies, except their absorption, distribution, metabolism, and excretion (“ADME”) properties are intrinsically different and they generally lack many of the immune effector functions generally associated with antibodies (e.g., antibody-dependent cellular cytotoxicity, complement-dependent cytotoxicity). In comparing many of the properties of aptamers and antibodies previously described, several factors suggest that toxin-delivery via aptamers offers several concrete advantages over delivery with antibodies, ultimately affording them better potential as therapeutics. Several examples of the advantages of toxin-delivery via aptamers over antibodies are as follows:

[0327] 1) Aptamer-toxin conjugates are entirely chemically synthesized. Chemical synthesis provides more control over the nature of the conjugate. For example, the stoichiometry (ratio of toxins per aptamer) and site of attachment can be precisely defined. Different linker chemistries can be readily tested. The reversibility of aptamer folding means that loss of activity during conjugation is unlikely and provides more flexibility in adjusting conjugation conditions to maximize yields.

[0328] 2) Smaller size allows better tumor penetration. Poor penetration of antibodies into solid tumors is often cited as a factor limiting the efficacy of conjugate approaches. See Colcher, D., Goel, A., Pavlinkova, G., Beresford, G., Booth, B., Batra, S. K. (1999) “Effects of genetic engineering on the pharmacokinetics of antibodies,” Q. J. Nucl. Med., 43: 132-139. Studies comparing the properties of unPEGylated anti-tenascin C aptamers with corresponding antibodies demonstrate efficient uptake into tumors (as defined by the tumor:blood ratio) and evidence that aptamer localized to the tumor is unexpectedly long-lived (t_{1/2}>12 hours) (Hicke, B. J., Stephens, A. W., “Escort aptamers: a delivery service for diagnosis and therapy”, J. Clin. Invest., 106:923-928 (2000)).

[0329] 3) Tunable PK. Aptamer half-life/metabolism can be easily tuned to match properties of payload, optimizing the ability to deliver toxin to the tumor while minimizing systemic exposure. Appropriate modifications to the aptamer backbone and addition of high molecular weight PEGs should make it possible to match the half-life of the aptamer to the intrinsic half-life of the conjugated toxin/linker, minimizing systemic exposure to non-functional toxin-bearing metabolites (expected if t_{1/2}(aptamer)<<t_{1/2}(toxin)) and reducing the likelihood that persisting unconjugated aptamer will functionally block uptake of conjugated aptamer (expected if t_{1/2}(aptamer)>>t_{1/2} (toxin)).

[0330] 4) Relatively low material requirements. It is likely that dosing levels will be limited by toxicity intrinsic to the cytotoxic payload. As such, a single course of treatment will likely entail relatively small (<100 mg) quantities of aptamer, reducing the likelihood that the cost of oligonucleotide synthesis will be a barrier for aptamer-based therapies.

[0331] 5) Parenteral administration is preferred for this indication. There will be no special need to develop alternative formulations to drive patient/physician acceptance.

[0332] The invention provides a pharmaceutical composition comprising a therapeutically effective amount of an aptamer provided by the invention or a salt thereof, and a pharmaceutically acceptable carrier or diluent. The invention also provides a pharmaceutical composition comprising a therapeutically effective amount of the aptamer or a salt thereof, and a pharmaceutically acceptable carrier or diluent. Relatedly, the invention provides a method of treating or ameliorating a disease or disorder, comprising administering the pharmaceutical composition to a subject in need thereof. Administering a therapeutically effective amount of the composition to the subject may result in: (a) an enhancement of the delivery of the active agent to a disease site relative to delivery of the active agent alone; or (b) an enhancement of microvesicles clearance resulting in a decrease of at least 10%, 20%, 30%, 40%, 50%, 60%, 70%, 80%, or 90% in a blood level of microvesicles targeted by the aptamer; or (c) an decrease in biological activity of microvesicles targeted by the aptamer of at least 10%, 20%, 30%, 40%, 50%, 60%, 70%, 80%, or 90%. In an embodiment, the biological activity of microvesicles comprises immune suppression or transfer of genetic information. The disease or disorder can include without limitation those disclosed herein. For example, the disease or disorder may comprise a neoplastic, proliferative, or inflammatory, metabolic, cardiovascular, or neurological disease or disorder. See, e.g., section “Phenotypes.”

### Oligonucleotide Probe Methods

[0333] Nucleic acid sequences fold into secondary and tertiary motifs particular to their nucleotide sequence. These motifs position the positive and negative charges on the nucleic acid sequences in locations that enable the sequences to bind to specific locations on target molecules, e.g., proteins and other amino acid sequences. These binding sequences are known in the field as aptamers. Due to the trillions of possible unique nucleotide sequences in even a relatively short stretch of nucleotides (e.g., 10, 11, 12, 13, 14, 15, 16, 17, 18, 19, 20, 21, 22, 23, 24, 25, 26, 27, 28, 29, 30, 31, 32, 33, 34, 35, 36, 37, 38, 39 or 40 nucleotides), a large variety of motifs can be generated, resulting in aptamers for almost any desired protein or other target.

[0334] Aptamers are created by randomly generating oligonucleotides of a specific length, typically 20-80 base pairs long, e.g., 20, 21, 22, 23, 24, 25, 26, 27, 28, 29, 30, 31, 32, 33, 34, 35, 36, 37, 38, 39, 40, 41, 42, 43, 44, 45, 46, 47, 48, 49, 50, 51, 52, 53, 54, 55, 56, 57, 58, 59, 60, 61, 62, 63, 64, 65, 66, 67, 68, 69, 70, 71, 72, 73, 74, 75, 76, 77, 78, 79 or 80 base pairs. These random oligonucleotides are then incubated with the protein target of interest. After several wash steps, the oligonucleotides that bind to the target are collected and amplified. The amplified aptamers are then added to the target and the process is repeated, often 15-20 times. A common version of this process known to those of skill in the art as the SELEX method.

[0335] The end result comprises one or more aptamer with high affinity to the target. The invention provides further processing of such resulting aptamers that can be use to provide desirable characteristics: 1) competitive binding assays to identify aptamers to a desired epitope; 2) motif analysis to identify high affinity binding aptamers in silico; and 3) microvesicle-based aptamer selection assays to identify aptamers that can be used to detect a particular disease. The methods are described in more detail below and further in the Examples.

[0336] The invention further contemplates aptamer sequences that are highly homologous to the sequences that are discovered by the methods of the invention. “High homology” typically refers to a homology of 40% or higher, preferably 60% or higher, more preferably 80% or higher, even more preferably 85%, 90%, 91%, 92%, 93%, 94%, 95%, 96%, 97%, 98%, 99% or higher between a polynucleotide sequence and a reference sequence. In an embodiment, the reference sequence comprises the sequence of one or more aptamer provided herein. Percent homologies (also referred to as percent identity) are typically carried out between two optimally aligned sequences. Methods of alignment of sequences for comparison are well-known in the art. Optimal alignment of sequences and comparison can be conducted, e.g., using the algorithm in “Wilbur and Lipman, Proc Natl Acad Sci USA 80: 726-30 (1983)”. Homology calculations can also be performed using BLAST, which can be found on the NCBI server at: www.ncbi.nlm.nih.gov/BLAST/(Altschul S F, et al, Nucleic Acids Res. 1997; 25(17):3389-402; Altschul S F, et al, J Mol. Biol. 1990; 215(3):403-10). In the case of an isolated polynucleotide which is longer than or equivalent in length to the reference sequence, e.g., a sequence identified by the methods herein, the comparison is made with the full length of the reference sequence. Where the isolated polynucleotide is shorter than the reference sequence, e.g., shorter than a sequence identified by the methods herein, the comparison is made to a segment of the reference sequence of the same length (excluding any loop required by the homology calculation).

[0337] The invention further contemplates aptamer sequences that are functional fragments of the sequences that are discovered by the methods of the invention. In the context of an aptamer sequence, a “functional fragment” of the aptamer sequence may comprise a subsequence that binds to the same target as the full length sequence. In some instances, a candidate aptamer sequence is from a member of a library that contains a 5′ leader sequences and/or a 3′ tail sequence. Such leader sequences or tail sequences may serve to facilitate primer binding for amplification or capture, etc. In these embodiments, the functional fragment of the full length sequence may comprise the subsequence of the candidate aptamer sequence absent the leader and/or tail sequences.

[0338] Competitive Antibody Addition

[0339] Known aptamer production methods may involve eluting all bound aptamers from the target sequence. In some cases, this is not sufficient to identify the desired aptamer sequence. For example, when trying to replace an antibody in an assay, it may be desirable to only collect aptamers that bind to the specific epitope of the antibody being replaced. The invention provides a method comprising addition of an antibody that is to be replaced to the aptamer/target reaction in order to allow for the selective collection of aptamers which bind to the antibody epitope. In an embodiment, the method comprises incubating a reaction mixture comprising randomly generated oligonucleotides with a target of interest, removing unbound aptamers from the reaction mixture that do not bind the target, adding an antibody to the reaction mixture that binds to that epitope of interest, and collecting the aptamers that are displaced by the antibody. The target can be a protein. See, e.g., FIG. 1, which illustrates the method for identifying an aptamer to a specific epitope of EpCam.

[0340] Motif Analysis

[0341] In most aptamer experiments, multiple aptamer sequences are identified that bind to the target. These aptamers will have various binding affinities. It can be time consuming and laborious to generate quantities of these many aptamers sufficient to assess the affinities of each. To identify large numbers of aptamers with the highest affinities without physically screening large subsets, the invention provides a method comprising the analysis of the two dimensional structure of one or more high affinity aptamers to the target of interest. In an embodiment, the method comprises screening the database for aptamers that have similar two-dimensional structures, or motifs, but not necessarily similar primary sequences. In an embodiment, the method comprises identifying a high affinity aptamer using traditional methods such as disclosed herein or known in the art (e.g. surface plasmon resonance binding assay, see FIG. 5), approximating the two-dimensional structure of the high affinity aptamer, and identifying aptamers from a pool of sequences that are predicted to have a similar two-dimensional structure to the high affinity aptamer. The method thereby provides a pool of candidates that also bind the target of interest. The two-dimensional structure of an oligo can be predicting using methods known in the art, e.g., via free energy (ΔG) calculations performed using a commercially available software program such as Vienna or mFold, for example as described in Mathews, D., Sabina, J., Zucker, M. & Turner, H. Expanded sequence dependence of thermodynamic parameters provides robust prediction of RNA secondary structure. J. Mol. Biol. 288, 911-940 (1999); Hofacker et al., Monatshefte f. Chemie 125: 167-188 (1994); and Hofacker, I. L. Vienna RNA secondary structure server. Nucleic Acids Res. 31, 3429-3431 (2003), the contents of which are incorporated herein by reference in their entirety. See FIGS. 3A-3B. The pool of sequences can be sequenced from a pool of randomly generated aptamer candidates using a high-throughput sequencing platform, such as the Ion Torrent platform from Life Technologies. Identifying aptamers from a pool of sequences that are predicted to have a similar two-dimensional structure to the high affinity aptamer may comprise loading the resulting sequences into the software program of choice to identify members of the pool of sequences with similar two-dimensional structures as the high affinity aptamer. The affinities of the pool of sequences can then be determined in situ, e.g., surface plasmon resonance binding assay or the like.

[0342] Aptamer Subtraction Methods

[0343] In order to develop an assay to detect a disease, for example, cancer, one typically screens a large population of known biomarkers from normal and diseased patients in order to identify markers that correlate with disease. This process only works if discriminating markers are already described. In order to address this problem, the invention provides a method comprising subtracting out non-discriminating aptamers from a large pool of aptamers by incubating them initially with non-target microvesicles or cells. The non-target cells can be normal cells or microvesicles shed therefrom. The aptamers that did not bind to the normal microvesicles or cells are then incubated with diseased microvesicles or cells. The aptamers that bind to the diseased microvesicles or cells but that did not bind to the normal cells are then possible candidates for an assay to detect the disease. This process is independent of knowing the existence of a particular marker in the diseased sample.

[0344] Subtraction methods can be used to identify aptamers that preferentially recognize a desired population of targets. In an embodiment, the subtraction method is used to identify aptamers that preferentially recognize target from a diseased target population over a control (e.g., normal or non-diseased) population. The diseased target population may be a population of vesicles from a diseased individual or individuals, whereas the control population comprises vesicles from a non-diseased individual or individuals. The disease can be a cancer or other disease disclosed herein or known in the art. Accordingly, the method provides aptamers that preferentially identify disease targets versus control targets.

[0345] Circulating microvesicles can be isolated from control samples, e.g., plasma from “normal” individuals that are absent a disease of interest, such as an absence of cancer. Vesicles in the sample are isolated using a method disclosed herein or as known in the art. For example, vesicles can be isolated from the plasma by one of the following methods: filtration, ultrafiltration, nanomembrane ultrafiltration, the ExoQuick reagent (System Biosciences, Inc., Mountain View, Calif.), centrifugation, ultracentrifugation, using a molecular crowding reagent (e.g., TEXIS from Life Technologies), polymer precipitation (e.g., polyethylene glycol (PEG)), affinity isolation, affinity selection, immunoprecipitation, chromatography, size exclusion, or a combination of any of these methods. The microvesicles isolated in each case will be a mixture of vesicle types and will be various sizes although ultracentrifugation methods may have more tendencies to produce exosomal-sized vesicles. Randomly generated oligonucleotide libraries (e.g., produced as described in the Examples herein) are incubated with the isolated normal vesicles. The aptamers that do not bind to these vesicles are isolated, e.g., by spinning down the vesicles and collecting the supernatant containing the non-binding aptamers. These non-binding aptamers are then contacted with vesicles isolated from diseased patients (e.g., using the same methods as described above) to allow the aptamers to recognize the disease vesicles. Next, aptamers that are bound to the diseased vesicles are collected. In an embodiment, the vesicles are isolated then lysed using a chaotropic agent (e.g., SDS or a similar detergent), and the aptamers are then captured by running the lysis mixture over an affinity column. The affinity column may comprise streptavidin beads in the case of biotin conjugated aptamer pools. The isolated aptamers are the amplified. The process can then repeated, e.g., 1, 2, 3, 4, 5, 6, 7, 8, 9, 10, 11, 12, 13, 14, 15, 16, 17, 18, 19 or 20 or more times.

[0346] In one aspect of the invention, an aptamer profile is identified that can be used to characterize a biological sample of interest. In an embodiment, a pool of randomly generated oligonucleotides, e.g., at least 10, 10², 10³, 10⁴, 10⁵, 10⁶, 10⁷, 10⁸, 10⁹, 10¹⁰, 10¹¹, 10¹², 10¹³, 10¹⁴, 10¹⁵, 10¹⁶, 10¹⁷, 10¹⁸, 10¹⁹ or at least 10²⁰ oligonucleotides, is contacted with a biological component or target of interest from a control population. The oligonucleotides that do not bind the biological component or target of interest from the control population are isolated and then contacted with a biological component or target of interest from a test population. The oligonucleotides that bind the biological component or target of interest from the test population are retained. The retained oligonucleotides can be used to repeat the process by contacting the retained oligonucleotides with the biological component or target of interest from the control population, isolating the retained oligonucleotides that do not bind the biological component or target of interest from the control population, and again contacting these isolated oligonucleotides with the biological component or target of interest from the test population and isolating the binding oligonucleotides. The “component” or “target” can be anything that is present in sample to which the oligonucleotides are capable of binding (e.g., polypeptides, peptide, nucleic acid molecules, carbohydrates, lipids, etc.). The process can be repeated any number of desired iterations, e.g., 1, 2, 3, 4, 5, 6, 7, 8, 9, 10, 11, 12, 13, 14, 15, 16, 17, 18, 19 or 20 or more times. The resulting oligonucleotides comprise aptamers that can differentially detect the test population versus the control. These aptamers provide an aptamer profile, which comprises a biosignature that is determined using one or more aptamer, e.g., a biosignature comprising a presence or level of the component or target which is detected using the one or more aptamer.

[0347] An exemplary process is illustrated in FIG. 4, which demonstrates the method to identify aptamer that preferentially recognize cancer vesicles using vesicles from normal (non-cancer) individuals as a control. In the figure, exosomes are exemplified but one of skill will appreciate that other microvesicles can be used in the same manner. The resulting aptamers can provide a profile that can differentially detect the cancer vesicles from the normal vesicles. One of skill will appreciate that the same steps can be used to derive an aptamer profile to characterize any disease or condition of interest.

[0348] In an embodiment, the invention provides an isolated polynucleotide that encodes a polypeptide, or a fragment thereof, identified by the methods above. The invention further provides an isolated polynucleotide having a nucleotide sequence that is at least 60% identical to the nucleotide sequence identified by the methods above. More preferably, the isolated nucleic acid molecule is at least 65%, 70%, 75%, 80%, 85%, 90%, 91%, 92%, 93%, 94%, 95%, 96%, 97%, 98%, 99% or more, identical to the nucleotide sequence identified by the methods above. In the case of an isolated polynucleotide which is longer than or equivalent in length to the reference sequence, e.g., a sequence identified by the methods above, the comparison is made with the full length of the reference sequence. Where the isolated polynucleotide is shorter than the reference sequence, e.g., shorter than a sequence identified by the methods above, the comparison is made to a segment of the reference sequence of the same length (excluding any loop required by the homology calculation).

[0349] In a related aspect, the invention provides a method of characterizing a biological phenotype using an aptamer profile. The aptamer profile can be determined using the method above. The aptamer profile can be determined for a test sample and compared to a control aptamer profile. The phenotype may be a disease or disorder such as a cancer. Characterizing the phenotype can include without limitation providing a diagnosis, prognosis, or theranosis. Thus, the aptamer profile can provide a diagnostic, prognostic and/or theranostic readout for the subject from whom the test sample is obtained.

[0350] In another embodiment, an aptamer profile is determined for a test sample by contacting a pool of aptamer molecules to the test sample, contacting the same pool of aptamers to a control sample, and identifying one or more aptamer molecules that differentially bind a component or target in the test sample but not in the control sample (or vice versa). A “component” or “target” as used in the context of the biological test sample or control sample can be anything that is present in sample to which the aptamers are capable of binding (e.g., polypeptides, peptide, nucleic acid molecules, carbohydrates, lipids, etc.). For example, if a sample is a plasma or serum sample, the aptamer molecules may bind a polypeptide biomarker that is solely expressed or differentially expressed (over- or underexpressed) in a disease state as compared to a non-diseased subject. Comparison of the aptamer profile in the test sample as compared to the control sample may be based on qualitative and quantitative measure of aptamer binding (e.g., binding versus no binding, or level of binding in test sample versus different level of binding in the reference control sample).

[0351] In an aspect, the invention provides a method of identifying a target-specific aptamer profile, comprising contacting a biological test sample with a pool of aptamer molecules, contacting the pool to a control biological sample, identifying one or more aptamers that bind to a component in said test sample but not to the control sample, thereby identifying an aptamer profile for said biological test sample. In an embodiment, a pool of aptamers is selected against a disease sample and compared to a reference sample, the aptamers in a subset that bind to a component(s) in the disease sample but not in the reference sample can be sequenced using conventional sequencing techniques to identify the subset that bind, thereby identifying an aptamer profile for the particular disease sample. In this way, the aptamer profile provides an individualized platform for detecting disease in other samples that are screened. Furthermore, by selecting an appropriate reference or control sample, the aptamer profile can provide a diagnostic, prognostic and/or theranostic readout for the subject from whom the test sample is obtained.

[0352] In a related aspect, the invention provides a method of selecting a pool of aptamers, comprising: (a) contacting a biological control sample with a pool of oligonucleotides; (b) isolating a first subset of the pool of oligonucleotides that do not bind the biological control sample; (c) contacting the biological test sample with the first subset of the pool of oligonucleotides; and (d) isolating a second subset of the pool of oligonucleotides that bind the biological test sample, thereby selecting the pool of aptamers. The pool of oligonucleotides may comprise any number of desired sequences, e.g., at least 10, 10², 10³, 10⁴, 10⁵, 10⁶, 10⁷, 10⁸, 10⁹, 10¹⁰, 10¹¹, 10¹², 10¹³, 10¹⁴, 10¹⁵, 10¹⁶, 10¹⁷, 10¹⁸, 10¹⁹ or at least 10²⁰ oligonucleotides may be present in the starting pool. Steps (a)-(d) may be repeated to further hone the pool of aptamers. In an embodiment, these steps are repeated at least 1, 2, 3, 4, 5, 6, 7, 8, 9, 10, 11, 12, 13, 14, 15, 16, 17, 18, 19 or at least 20 times.

[0353] As described herein, the biological test sample and biological control sample may comprise microvesicles. In an embodiment, the biological test sample and optionally biological control sample comprise a bodily fluid. The bodily fluid may comprise without limitation peripheral blood, sera, plasma, ascites, urine, cerebrospinal fluid (CSF), sputum, saliva, bone marrow, synovial fluid, aqueous humor, amniotic fluid, cerumen, breast milk, broncheoalveolar lavage fluid, semen, prostatic fluid, Cowper's fluid, pre-ejaculatory fluid, female ejaculate, sweat, fecal matter, hair, tears, cyst fluid, pleural fluid, peritoneal fluid, malignant fluid, pericardial fluid, lymph, chyme, chyle, bile, interstitial fluid, menses, pus, sebum, vomit, vaginal secretions, mucosal secretion, stool water, pancreatic juice, lavage fluids from sinus cavities, bronchopulmonary aspirates or other lavage fluids. The biological test sample and optionally biological control may also comprise a tumor sample, e.g., cells from a tumor or tumor tissue. In other embodiments, the biological test sample and optionally biological control sample comprise a cell culture medium. In embodiments, the biological test sample comprises a diseased sample and the biological control sample comprises a non-diseased sample. Accordingly, the pool of aptamers may be used to provide a diagnostic, prognostic and/or theranostic readout a disease.

[0354] As noted, the invention can be used to assess microvesicles. Microvesicles are powerful biomarkers because the vesicles provide one biological entity that comprises multiple pieces of information. For example as described, a vesicle can have multiple surface antigens, each of which provides complementary information. Consider a cancer marker and a tissue specific marker. If both markers are individually present in a sample, e.g., both are circulating proteins or nucleic acids, it may not be ascertainable whether the cancer marker and the tissue specific marker are derived from the same anatomical locale. However, if both the cancer marker and the tissue specific marker are surface antigens on a single microvesicle, the vesicle itself links the two markers and provides an indication of a disease (via the cancer marker) and origin of the disease (via the tissue specific marker). Furthermore, the vesicle can have any number of surface antigens and also payload that can be assessed. Accordingly, the invention provides a method for identifying binding agents comprising contacting a plurality of extracellular microvesicles with a randomly generated library of binding agents, identifying a subset of the library of binding agents that have an affinity to one or more components of the extracellular microvesicles. The binding agents may comprise aptamers, antibodies, and/or any other useful type of binding agent disclosed herein or known in the art.

[0355] In a related aspect, the invention provides a method for identifying a plurality of target ligands comprising, (a) contacting a reference microvesicle population with a plurality of ligands that are capable of binding one or more microvesicle surface markers, (b) isolating a plurality of reference ligands, wherein the plurality of reference ligands comprise a subset of the plurality of ligands that do not have an affinity for the reference microvesicle population; (c) contacting one or more test microvesicle with the plurality of reference ligands; and (d) identifying a subset of ligands from the plurality of reference ligands that form complexes with a surface marker on the one or more test microvesicle, thereby identifying the plurality of target ligands. The term “ligand” can refer a molecule, or a molecular group, that binds to another chemical entity to form a larger complex. Accordingly, a binding agent comprises a ligand. The plurality of ligands may comprise aptamers, antibodies and/or other useful binding agents described herein or known in the art.

[0356] The invention further provides kits comprising one or more reagent to carry out the methods above. In an embodiment, the one or more reagent comprises a library of potential binding agents that comprises one or more of an aptamer, antibody, and other useful binding agents described herein or known in the art.

[0357] Negative and Positive Aptamer Selection

[0358] Aptamers can be used in various biological assays, including numerous types of assays which rely on a binding agent. For example, aptamers can be used instead of or along side antibodies in immune-based assays. The invention provides an aptamer screening method that identifies aptamers that do not bind to any surfaces (substrates, tubes, filters, beads, other antigens, etc.) throughout the assay steps and bind specifically to an antigen of interest. The assay relies on negative selection to remove aptamers that bind non-target antigen components of the final assay. The negative selection is followed by positive selection to identify aptamers that bind the desired antigen.

[0359] In an aspect, the invention provides a method of identifying an aptamer specific to a target of interest, comprising (a) contacting a pool of candidate aptamers with one or more assay components, wherein the assay components do not comprise the target of interest; (b) recovering the members of the pool of candidate aptamers that do not bind to the one or more assay components in (a); (c) contacting the members of the pool of candidate aptamers recovered in (b) with the target of interest in the presence of one or more confounding target; and (d) recovering a candidate aptamer that binds to the target of interest in step (c), thereby identifying the aptamer specific to the target of interest. In the method, steps (a) and (b) provide negative selection to remove aptamers that bind non-target entities. Conversely, steps (c) and (d) provide positive selection by identifying aptamers that bind the target of interest but not other confounding targets, e.g., other antigens that may be present in a biological sample which comprises the target of interest. The pool of candidate aptamers may comprise at least 10, 10², 10³, 10⁴, 10⁵, 10⁶, 10⁷, 10⁸, 10⁹, 10¹⁰, 10¹¹, 10¹², 10¹³, 10¹⁴, 10¹⁵, 10¹⁶, 10¹⁷, 10¹⁸, 10¹⁹ or at least 10²⁰ nucleic acid sequences. One illustrative approach for performing the method is provided in Example 7.

[0360] In some embodiments, steps (a)-(b) are optional. In other embodiments, steps (a)-(b) are repeated at least 1, 2, 3, 4, 5, 6, 7, 8, 9, 10, 11, 12, 13, 14, 15, 16, 17, 18, 19 or at least 20 times before positive selection in step (c) is performed. The positive selection can also be performed in multiple rounds. Steps (c)-(d) can be repeated at least 1, 2, 3, 4, 5, 6, 7, 8, 9, 10, 11, 12, 13, 14, 15, 16, 17, 18, 19 or at least 20 times before identifying the aptamer specific to the target of interest. Multiple rounds may provide improved stringency of selection.

[0361] In some embodiments, the one or more assay components contacted with the aptamer pool during negative selection comprise one or more of a substrate, a bead, a planar array, a column, a tube, a well, or a filter. One of skill will appreciate that the assay components can include any substance that may be part of a biological assay.

[0362] The target of interest can be any appropriate entity that can be detected when recognized by an aptamer. In an embodiment, the target of interest comprises a protein or polypeptide. As used herein, “protein,” “polypeptide” and “peptide” are used interchangeably unless stated otherwise. The target of interest can be a nucleic acid, including DNA, RNA, and various subspecies of any thereof as disclosed herein or known in the art. The target of interest can comprise a lipid. The target of interest can comprise a carbohydrate. The target of interest can also be a complex, e.g., a complex comprising protein, nucleic acids, lipids and/or carbohydrates. In some embodiments, the target of interest comprises a microvesicle. In such cases, the aptamer can be a binding agent to a microvesicle surface antigen, e.g., a protein. General microvesicle surface antigens include tetraspanin, CD9, CD63, CD81, CD63, CD9, CD81, CD82, CD37, CD53, Rab-5b, Annexin V, and MFG-E8. Additional general microvesicle surface antigens are provided in Table 3 herein.

[0363] The microvesicle surface antigen can also be a biomarker of a disease or disorder. In such cases, the aptamer may be used to provide a diagnosis, prognosis or theranosis of the disease or disorder. For example, the one or more protein may comprise one or more of PSMA, PCSA, B7H3, EpCam, ADAM-10, BCNP, EGFR, IL1B, KLK2, MMP7, p53, PBP, SERPINB3, SPDEF, SSX2, and SSX4. These markers can be used detect a prostate cancer. Additional microvesicle surface antigens are provided in Tables 3-4 herein.

[0364] The one or more confounding target can be an antigen other than the target of interest. For example, a confounding target can be another entity that may be present in a sample to be assayed. As a non-limiting example, consider that the sample to be assessed is a plasma sample from an individual. The target of interest may be a protein, e.g., a microvesicle surface antigen, which is present in the sample. In this case, a confounding target could be selected from any other antigen that is likely to be present in the plasma sample. Accordingly, the positive selection should provide candidate aptamers that recognize the target of interest but have minimal, if any, interactions with the confounding targets. In some embodiments, the target of interest and the one or more confounding target comprise the same type of biological entity, e.g., all protein, all nucleic acid, all carbohydrate, or all lipids. As a non-limiting example, the target of interest can be a protein selected from the group consisting of SSX4, SSX2, PBP, KLK2, SPDEF, and EpCAM, and the one or more confounding target comprises the other members of this group. In other embodiments, the target of interest and the one or more confounding target comprise different types of biological entities, e.g., any combination of protein, nucleic acid, carbohydrate, and lipids. The one or more confounding targets may also comprise different types of biological entities, e.g., any combination of protein, nucleic acid, carbohydrate, and lipids.

[0365] In an embodiment, the invention provides an isolated polynucleotide, or a fragment thereof, identified by the methods above. The invention further provides an isolated polynucleotide having a nucleotide sequence that is at least 60% identical to the nucleotide sequence identified by the methods above. More preferably, the isolated nucleic acid molecule is at least 65%, 70%, 75%, 80%, 85%, 90%, 91%, 92%, 93%, 94%, 95%, 96%, 97%, 98%, 99% or more, identical to the nucleotide sequence identified by the methods above. In the case of an isolated polynucleotide which is longer than or equivalent in length to the reference sequence, e.g., a sequence identified by the methods above, the comparison is made with the full length of the reference sequence. Where the isolated polynucleotide is shorter than the reference sequence, e.g., shorter than a sequence identified by the methods above, the comparison is made to a segment of the reference sequence of the same length (excluding any loop required by the homology calculation).

[0366] In a related aspect, the invention provides a method of selecting a group of aptamers, comprising: (a) contacting a pool of aptamers to a population of microvesicles from a first sample; (b) enriching a subpool of aptamers that show affinity to the population of microvesicles from the first sample; (c) contacting the subpool to a second population of microvesicles from a second sample; and (d) depleting a second subpool of aptamers that show affinity to the second population of microvesicles from the second sample, thereby selecting the group of aptamers that have preferential affinity for the population of microvesicles from the first sample.

[0367] The first sample and/or second sample may comprise a biological fluid such as disclosed herein. For example, the biological fluid may include without limitation blood, a blood derivative, plasma, serum or urine. The first sample and/or second sample may also be derived from a cell culture.

[0368] In an embodiment, the first sample comprises a cancer sample and the second sample comprises a control sample, such as a non-cancer sample. The first sample and/or and the second sample may each comprise a pooled sample. For example, the first sample and/or second sample can comprise bodily fluid from 2, 3, 4, 5, 6, 7, 8, 9, 10, 11, 12, 13, 14, 15, 16, 17, 18, 19, 20, 25, 30, 40, 50, 60, 70, 80, 90, 100 or more than 100 individuals. In such cases, the members of a pool may be chosen to represent a desired phenotype. In a non-limiting example, the members of the first sample pool may be from patients with a cancer and the members of the second sample pool may be from non-cancer controls.

[0369] Steps (a)-(d) can be repeated a desired number of times in order to further enrich the pool in aptamers that have preferential affinity for the population of microvesicles from the first sample. For example, steps (a)-(d) can be repeated 1, 2, 3, 4, 5, 6, 7, 8, 9, 10, 11, 12, 13, 14, 15, 16, 17, 18, 19, 20 or more than 20 times. The output from step (d) can be used as the input to repeated step (a). In embodiment, the first sample and/or second sample are replaced with a different sample before repeating steps (a)-(d). In a non-limiting example, members of a first sample pool may be from patients with a cancer and members of a second sample pool may be from non-cancer controls. During subsequent repetitions of steps (a)-(d), the first sample pool may comprise samples from different cancer patients than in the prior round/s. Similarly, the second sample pool may comprise samples from different controls than in the prior round/s.

[0370] In still another related aspect, the invention provides a method of enriching a plurality of oligonucleotides, comprising: (a) contacting a first microvesicle population with the plurality of oligonucleotides; (b) fractionating the first microvesicle population contacted in step (a) and recovering members of the plurality of oligonucleotides that fractionated with the first microvesicle population; (c) contacting the recovering members of the plurality of oligonucleotides from step (b) with a second microvesicle population; (d) fractionating the second microvesicle population contacted in step (c) and recovering members of the plurality of oligonucleotides that did not fractionate with the second microvesicle population; (e) contacting the recovering members of the plurality of oligonucleotides from step (d) with a third microvesicle population; and (f) fractionating the third microvesicle population contacted in step (a) and recovering members of the plurality of oligonucleotides that fractionated with the third microvesicle population; thereby enriching the plurality of oligonucleotides. The first and third microvesicle populations may have a first phenotype while the second microvesicle population has a second phenotype. Thus, positive selection occurs for the microvesicle populations associated with the first phenotype and negative selection occurs for the microvesicle populations associated with the second phenotype. An example of such selection schemes is described in Example 18 herein, wherein the first phenotype comprises biopsy-positive breast cancer and the second phenotype comprises non-breast cancer (biopsy-negative or healthy).

[0371] In some embodiments, the first phenotype comprises a medical condition, disease or disorder and the second phenotype comprises a healthy state or a different state of the medical condition, disease or disorder. The first phenotype can be a healthy state and the second phenotype comprises a medical condition, disease or disorder. The medical condition, disease or disorder can be any detectable medical condition, disease or disorder, including without limitation a cancer, a premalignant condition, an inflammatory disease, an immune disease, an autoimmune disease or disorder, a cardiovascular disease or disorder, neurological disease or disorder, infectious disease or pain. Various types of such conditions are disclosed herein. See, e.g., Section “Phenotypes” herein.

[0372] Any useful method to isolate microvesicles in whole or in part can be used to fractionate the samples. See, e.g., Section “Microvesicle Isolation and Analysis” herein. In an embodiment, the fractionating comprises ultracentrifugation in step (b) and polymer precipitation in steps (d) and (f). The polymer can be polyethylene glycol (PEG). Any appropriate form of PEG may be used. For example, the PEG may be PEG 8000. The PEG may be used at any appropriate concentration. For example, the PEG can be used at a concentration of 1%, 2%, 3%, 4%, 5%, 6%, 7%, 8%, 9%, 10%, 11%, 12%, 13%, 14% or 15% to isolate the microvesicles. In some embodiments, the PEG is used at a concentration of 6%.

[0373] The contacting can be performed in the presence of a competitor, which may reduce non-specific binding events. Any useful competitor can be used. In an embodiment, the competitor comprises at least one of salmon sperm DNA, tRNA, dextran sulfate and carboxymethyl dextran. As desired, different competitors or competitor concentrations can be used at different contacting steps.

[0374] The method can be repeated to achieve a desired enrichment. In an embodiment, steps (a)-(f) are repeated at least once. These steps can be repeated 1, 2, 3, 4, 5, 6, 7, 8, 9, 10, 11, 12, 13, 14, 15, 16, 17, 18, 19, 20, or more than 20 times as desired. At the same time, each of the contacting steps can be repeated as desired. In some embodiments, the method further comprises: (i) repeating steps (a)-(b) at least once prior to step (c), wherein the recovered members of the plurality of oligonucleotides that fractionated with the first microvesicle population in step (b) are used as the input plurality of oligonucleotides for the repetition of step (a); (ii) repeating steps (c)-(d) at least once prior to step (e), wherein the recovered members of the plurality of oligonucleotides that did not fractionate with the second microvesicle population in step (d) are used as the input plurality of oligonucleotides for the repetition of step (c); and/or (iii) repeating steps (e)-(f) at least once, wherein the recovered members of the plurality of oligonucleotides that fractionated with the third microvesicle population in step (f) are used as the input plurality of oligonucleotides for the repetition of step (e). Repetitions (i)-(iii) can be repeated any desired number of times, e.g., (i)-(iii) can be repeated 1, 2, 3, 4, 5, 6, 7, 8, 9, 10, 11, 12, 13, 14, 15, 16, 17, 18, 19, 20 or more than 20 times. In an embodiment, (i)-(iii) each comprise three repetitions.

[0375] The method may further comprise identifying the members of the selected group of aptamers or oligonucleotides, e.g., by DNA sequencing. The sequencing may be performed by Next Generation sequencing as desired and after or before any desired step in the method.

[0376] The method may also comprise identifying the targets of the selected group of aptamers/oligonucleotides. Methods to identify such targets are disclosed herein.

[0377] Oligonucleotide Probe Target Identification

[0378] The methods and kits above can be used to identify binding agents that differentiate between two biomarker populations. The invention further provides methods of identifying the targets of binding agent. For example, the methods may further comprise identifying a surface marker of a target microvesicle that is recognized by the binding agent.

[0379] In an embodiment, the invention provides a method of identifying a target of a binding agent comprising: (a) contacting the binding agent with the target to bind the target with the binding agent, wherein the target comprises a surface antigen of a microvesicle; (b) disrupting the microvesicle under conditions which do not disrupt the binding of the target with the binding agent; (c) isolating the complex between the target and the binding agent; and (d) identifying the target bound by the binding agent. The binding agent can be a binding agent identified by the methods above, e.g., an aptamer, ligand, antibody, or other useful binding agent that can differentiate between two populations of biomarkers.

[0380] An illustrative schematic for carrying on the method is shown in FIG. 9. The figure shows a binding agent 902, here an oligonucleotide probe or aptamer for purposes of illustration, tethered to a substrate 901. The binding agent 902 can be covalently attached to substrate 901. The binding agent 902 may also be non-covalently attached. For example, binding agent 902 can comprise a label which can be attracted to the substrate, such as a biotin group which can form a complex with an avidin/streptavidin molecule that is covalently attached to the substrate. This can allow a complex to be formed between the aptamer and the microvesicle while in solution, followed by capture of the aptamer using the biotin label. The binding agent 902 binds to a surface antigen 903 of microvesicle 904. In the step signified by arrow (i), the microvesicle is disrupted while leaving the complex between the binding agent 902 and surface antigen 903 intact. Disrupted microvesicle 905 is removed, e.g., via washing or buffer exchange, in the step signified by arrow (ii). In the step signified by arrow (iii), the surface antigen 903 is released from the binding agent 902. The surface antigen 903 can be analyzed to determine its identity using methods disclosed herein and/or known in the art. The target of the method can be any useful biological entity associated with a microvesicle. For example, the target may comprise a protein, nucleic acid, lipid or carbohydrate, or other biological entity disclosed herein or known in the art.

[0381] In some embodiments of the method, the target is cross-linked to the binding agent prior disrupting the microvesicle. Without being bound by theory, this step may assist in maintaining the complex between the binding agent and the target while the vesicle is disrupted. Any useful method of crosslinking disclosed herein or known in the art can be used. In embodiments, the cross-linking comprises photocrosslinking, an imidoester crosslinker, dimethyl suberimidate, an N-Hydroxysuccinimide-ester crosslinker, bissulfosuccinimidyl suberate (BS3), an aldehyde, acrolein, crotonaldehyde, formaldehyde, a carbodiimide crosslinker, N,N′-dicyclohexylcarbodiimide (DDC), N,N′-diisopropylcarbodiimide (DIC), 1-Ethyl-3-[3-dimethylaminopropyl]carbodiimide hydrochloride (EDC or EDAC), Succinimidyl-4-(N-maleimidomethyl)cyclohexane-1-carboxylate (SMCC), a Sulfosuccinimidyl-4-(N-maleimidomethyl)cyclohexane-1-carboxylate (Sulfo-SMCC), a Sulfo-N-hydroxysuccinimidyl-2-(6-[biotinamido]-2-(p-azido benzamido)-hexanoamido) ethyl-1,3′-dithioproprionate (Sulfo-SBED), 2-[N2-(4-Azido-2,3,5,6-tetrafluorobenzoyl)-N6-(6-biotin-amidocaproyl)-L-lysinyl]ethyl methanethiosulfonate (Mts-Atf-Biotin; available from Thermo Fisher Scientific Inc, Rockford Ill.), 2-{N2-[N6-(4-Azido-2,3,5,6-tetrafluorobenzoyl-6-amino-caproyl)-N6-(6-biotinamidocaproyl)-L-lysinylamido]}ethyl methanethiosultonate (Mts-Atf-LC-Biotin; available from Thermo Fisher Scientific Inc), a photoreactive amino acid (e.g., L-Photo-Leucine and L-Photo-Methionine, see, e.g., Suchanek, M., et al. (2005). Photo-leucine and photo-methionine allow identification of protein-protein interactions. Nat. Methods 2:261-267), an N-Hydroxysuccinimide (NHS) crosslinker, an NHS-Azide reagent (e.g., NHS-Azide, NHS-PEG4-Azide, NHS-PEG12-Azide; each available from Thermo Fisher Scientific, Inc.), an NHS-Phosphine reagent (e.g., NHS-Phosphine, Sulfo-NHS-Phosphine; each available from Thermo Fisher Scientific, Inc.), or any combination or modification thereof.

[0382] A variety of methods can be used to disrupt the microvesicle. For example, the vesicle membrane can be disrupted using mechanical forces, chemical agents, or a combination thereof. In embodiments, disrupting the microvesicle comprises use of one or more of a detergent, a surfactant, a solvent, an enzyme, or any useful combination thereof. The enzyme may comprise one or more of lysozyme, lysostaphin, zymolase, cellulase, mutanolysin, a glycanase, a protease, and mannase. The detergent or surfactant may comprise one or more of a octylthioglucoside (OTG), octyl beta-glucoside (OG), a nonionic detergent, Triton X, Tween 20, a fatty alcohol, a cetyl alcohol, a stearyl alcohol, cetostearyl alcohol, an oleyl alcohol, a polyoxyethylene glycol alkyl ether (Brij), octaethylene glycol monododecyl ether, pentaethylene glycol monododecyl ether, a polyoxypropylene glycol alkyl ether, a glucoside alkyl ether, decyl glucoside, lauryl glucoside, octyl glucoside, a polyoxyethylene glycol octylphenol ethers, a polyoxyethylene glycol alkylphenol ether, nonoxynol-9, a glycerol alkyl ester, glyceryl laurate, a polyoxyethylene glycol sorbitan alkyl esters, polysorbate, a sorbitan alkyl ester, cocamide MEA, cocamide DEA, dodecyldimethylamine oxide, a block copolymers of polyethylene glycol and polypropylene glycol, poloxamers, polyethoxylated tallow amine (POEA), a zwitterionic detergent, 3-[(3-cholamidopropyl)dimethylammonio]-1-propane sulfonate (CHAPS), a linear alkylbenzene sulfonate (LAS), a alkyl phenol ethoxylate (APE), cocamidopropyl hydroxysultaine, a betaine, cocamidopropyl betaine, lecithin, an ionic detergent, sodium dodecyl sulfate (SDS), cetrimonium bromide (CTAB), cetyl trimethylammonium chloride (CTAC), octenidine dihydrochloride, cetylpyridinium chloride (CPC), benzalkonium chloride (BAC), benzethonium chloride (BZT), 5-Bromo-5-nitro-1,3-dioxane, dimethyldioctadecylammonium chloride, dioctadecyldimethylammonium bromide (DODAB), sodium deoxycholate, nonyl phenoxypolyethoxylethanol (Tergitol-type NP-40; NP-40), ammonium lauryl sulfate, sodium laureth sulfate (sodium lauryl ether sulfate (SLES)), sodium myreth sulfate, an alkyl carboxylate, sodium stearate, sodium lauroyl sarcosinate, a carboxylate-based fluorosurfactant, perfluorononanoate, perfluorooctanoate (PFOA or PFO), and a biosurfactant. Mechanical methods of disruption that can be used comprise without limitation mechanical shear, bead milling, homogenation, microfluidization, sonication, French Press, impingement, a colloid mill, decompression, osmotic shock, thermolysis, freeze-thaw, desiccation, or any combination thereof.

[0383] As shown in FIG. 9, the binding agent may be tethered to a substrate. The binding agent can be tethered before or after the complex between the binding agent and target is formed. The substrate can be any useful substrate such as disclosed herein or known in the art. In an embodiment, the substrate comprises a microsphere. In another embodiment, the substrate comprises a planar substrate. The binding agent can also be labeled. Isolating the complex between the target and the binding agent may comprise capturing the binding agent via the label. For example, the label can be a biotin label. In such cases, the binding agent can be attached to the substrate via a biotin-avidin binding event.

[0384] Methods of identifying the target after release from the binding agent will depend on the type of target of interest. For example, when the target comprises a protein, identifying the target may comprise use of mass spectrometry (MS), peptide mass fingerprinting (PMF; protein fingerprinting), sequencing, N-terminal amino acid analysis, C-terminal amino acid analysis, Edman degradation, chromatography, electrophoresis, two-dimensional gel electrophoresis (2D gel), antibody array, and immunoassay. Nucleic acids can be identified by sequencing.

[0385] One of skill will appreciate that the method can be used to identify any appropriate target, including those not associated with a vesicle. For example, with respect to the FIG. 9, all steps except for the step signified by arrow (i) (i.e., disrupting the microvesicle), could be performed for a circulating target such as a protein, nucleic acid, lipid, carbohydrate, or combination thereof. The target can be any useful target, including without limitation a cell, an organelle, a protein complex, a lipoprotein, a carbohydrate, a microvesicle, a virus, a membrane fragment, a small molecule, a heavy metal, a toxin, a drug, a nucleic acid, mRNA, microRNA, a protein-nucleic acid complex, and various combinations, fragments and/or complexes of any of these.

[0386] In an aspect, the invention provides a method of identifying at least one protein associated with at least one microvesicle in a biological sample, comprising: a) contacting the at least one microvesicle with an oligonucleotide probe library, b) isolating at least one protein bound by at least one member of the oligonucleotide probe library in step a); and c) identifying the at least one protein isolated in step b). The isolating can be performed using any useful method such as disclosed herein, e.g., by immunopreciption or capture to a substrate. Similarly, the identifying can be performed using any useful method such as disclosed herein, including without limitation use of mass spectrometry, 2-D gel electrophoresis or an antibody array. Examples of such methodology are presented herein in Examples 23-25.

[0387] The targets identified by the methods of the invention can be detected, e.g., using the oligonucleotide probes of the invention, for various purposes as desired. For example, an identified microvesicle surface antigen can then be used to detect a microvesicle. In an aspect, the invention provides a method of detecting at least one microvesicle in a biological sample comprising contacting the biological sample with at least one binding agent to at least one microvesicle surface antigen and detecting the at least one microvesicle recognized by the binding agent to the at least one protein. In an embodiment, the at least one microvesicle surface antigen is selected from Tables 3-4 herein. The at least one microvesicle surface antigen can be a protein in any of Tables 18-25. See Example 23. The at least one binding agent may comprise any useful binding agent, including without limitation a nucleic acid, DNA molecule, RNA molecule, antibody, antibody fragment, aptamer, peptoid, zDNA, peptide nucleic acid (PNA), locked nucleic acid (LNA), lectin, peptide, dendrimer, membrane protein labeling agent, chemical compound, or a combination thereof. In some embodiments, the at least one binding agent comprises at least one oligonucleotide, such as an oligonucleotide probe as provided herein.

[0388] The at least one binding agent can be used to capture and/or detect the at least one microvesicle. Methods of detecting biomarkers and microvesicle using binding agents are provided herein. See, e.g., FIGS. 2A-B, which figures describe sandwich assay formats. In some embodiments, the at least one binding agent used to capture the at least one microvesicle is bound to a substrate. Any useful substrate can be used, including without limitation a planar array, a column matrix, or a microbead. See, e.g., FIGS. 2A-B. In some embodiments, the at least one binding agent used to detect the at least one microvesicle is labeled. Various useful labels are provided herein or known in the art, including without limitation a magnetic label, a fluorescent moiety, an enzyme, a chemiluminescent probe, a metal particle, a non-metal colloidal particle, a polymeric dye particle, a pigment molecule, a pigment particle, an electrochemically active species, a semiconductor nanocrystal, a nanoparticle, a quantum dot, a gold particle, a fluorophore, or a radioactive label.

[0389] In an embodiment, the detecting is used to characterize a phenotype. The phenotype can be any appropriate phenotype of interest. In some embodiments, the phenotype is a disease or disorder. The characterizing may comprise providing diagnostic, prognostic and/or theranostic information for the disease or disorder. The characterizing may be performed by comparing a presence or level of the at least one microvesicle to a reference. The reference can be selected per the characterizing to be performed. For example, when the phenotype comprises a disease or disorder, the reference may comprise a presence or level of the at least one microvesicle in a sample from an individual or group of individuals without the disease or disorder. The comparing can be determining whether the presence or level of the microvesicle differs from that of the reference. In some embodiments, the detected at least one microvesicle is found at higher levels in a healthy sample as compared to a diseased sample. In another embodiment, the detected at least one microvesicle is found at higher levels in a diseased sample as compared to a healthy sample. When multiplex assays are performed, e.g., using a plurality of binding agents to different biomarkers, some microvesicle antigens may be observed at a higher level in the biological samples as compared to the reference whereas other microvesicle antigens may be observed at a lower level in the biological samples as compared to the reference.

[0390] The method can be used to detect the at least one microvesicle in any appropriate biological sample. For example, the biological sample may comprise a bodily fluid, tissue sample or cell culture. The bodily fluid or tissue sample can be from a subject having or suspected of having a medical condition, a disease or a disorder. Thus, the method can be used to provide a diagnostic, prognostic, or theranostic read out for the subject. Any appropriate bodily fluid can be used, including without limitation peripheral blood, sera, plasma, ascites, urine, cerebrospinal fluid (CSF), sputum, saliva, bone marrow, synovial fluid, aqueous humor, amniotic fluid, cerumen, breast milk, broncheoalveolar lavage fluid, semen, prostatic fluid, cowper's fluid or pre-ejaculatory fluid, female ejaculate, sweat, fecal matter, hair oil, tears, cyst fluid, pleural and peritoneal fluid, pericardial fluid, lymph, chyme, chyle, bile, interstitial fluid, menses, pus, sebum, vomit, vaginal secretions, mucosal secretion, stool water, pancreatic juice, lavage fluids from sinus cavities, bronchopulmonary aspirates, blastocyl cavity fluid, or umbilical cord blood.

[0391] The method of the invention can be used to detect or characterize any appropriate disease or disorder of interest, including without limitation Breast Cancer, Alzheimer's disease, bronchial asthma, Transitional cell carcinoma of the bladder, Giant cellular osteoblastoclastoma, Brain Tumor, Colorectal adenocarcinoma, Chronic obstructive pulmonary disease (COPD), Squamous cell carcinoma of the cervix, acute myocardial infarction (AMI)/acute heart failure, Chron's Disease, diabetes mellitus type II, Esophageal carcinoma, Squamous cell carcinoma of the larynx, Acute and chronic leukemia of the bone marrow, Lung carcinoma, Malignant lymphoma, Multiple Sclerosis, Ovarian carcinoma, Parkinson disease, Prostate adenocarcinoma, psoriasis, Rheumatoid Arthritis, Renal cell carcinoma, Squamous cell carcinoma of skin, Adenocarcinoma of the stomach, carcinoma of the thyroid gland, Testicular cancer, ulcerative colitis, or Uterine adenocarcinoma.

[0392] In some embodiments, the disease or disorder comprises a cancer, a premalignant condition, an inflammatory disease, an immune disease, an autoimmune disease or disorder, a cardiovascular disease or disorder, neurological disease or disorder, infectious disease or pain. The cancer can include without limitation one of acute lymphoblastic leukemia; acute myeloid leukemia; adrenocortical carcinoma; AIDS-related cancers; AIDS-related lymphoma; anal cancer; appendix cancer; astrocytomas; atypical teratoid/rhabdoid tumor; basal cell carcinoma; bladder cancer; brain stem glioma; brain tumor (including brain stem glioma, central nervous system atypical teratoid/rhabdoid tumor, central nervous system embryonal tumors, astrocytomas, craniopharyngioma, ependymoblastoma, ependymoma, medulloblastoma, medulloepithelioma, pineal parenchymal tumors of intermediate differentiation, supratentorial primitive neuroectodermal tumors and pineoblastoma); breast cancer; bronchial tumors; Burkitt lymphoma; cancer of unknown primary site; carcinoid tumor; carcinoma of unknown primary site; central nervous system atypical teratoid/rhabdoid tumor; central nervous system embryonal tumors; cervical cancer; childhood cancers; chordoma; chronic lymphocytic leukemia; chronic myelogenous leukemia; chronic myeloproliferative disorders; colon cancer; colorectal cancer; craniopharyngioma; cutaneous T-cell lymphoma; endocrine pancreas islet cell tumors; endometrial cancer; ependymoblastoma; ependymoma; esophageal cancer; esthesioneuroblastoma; Ewing sarcoma; extracranial germ cell tumor; extragonadal germ cell tumor; extrahepatic bile duct cancer; gallbladder cancer; gastric (stomach) cancer; gastrointestinal carcinoid tumor; gastrointestinal stromal cell tumor; gastrointestinal stromal tumor (GIST); gestational trophoblastic tumor; glioma; hairy cell leukemia; head and neck cancer; heart cancer; Hodgkin lymphoma; hypopharyngeal cancer; intraocular melanoma; islet cell tumors; Kaposi sarcoma; kidney cancer; Langerhans cell histiocytosis; laryngeal cancer; lip cancer; liver cancer; lung cancer; malignant fibrous histiocytoma bone cancer; medulloblastoma; medulloepithelioma; melanoma; Merkel cell carcinoma; Merkel cell skin carcinoma; mesothelioma; metastatic squamous neck cancer with occult primary; mouth cancer; multiple endocrine neoplasia syndromes; multiple myeloma; multiple myeloma/plasma cell neoplasm; mycosis fungoides; myelodysplastic syndromes; myeloproliferative neoplasms; nasal cavity cancer; nasopharyngeal cancer; neuroblastoma; Non-Hodgkin lymphoma; nonmelanoma skin cancer; non-small cell lung cancer; oral cancer; oral cavity cancer; oropharyngeal cancer; osteosarcoma; other brain and spinal cord tumors; ovarian cancer; ovarian epithelial cancer; ovarian germ cell tumor; ovarian low malignant potential tumor; pancreatic cancer; papillomatosis; paranasal sinus cancer; parathyroid cancer; pelvic cancer; penile cancer; pharyngeal cancer; pineal parenchymal tumors of intermediate differentiation; pineoblastoma; pituitary tumor; plasma cell neoplasm/multiple myeloma; pleuropulmonary blastoma; primary central nervous system (CNS) lymphoma; primary hepatocellular liver cancer; prostate cancer; rectal cancer; renal cancer; renal cell (kidney) cancer; renal cell cancer; respiratory tract cancer; retinoblastoma; rhabdomyosarcoma; salivary gland cancer; Sezary syndrome; small cell lung cancer; small intestine cancer; soft tissue sarcoma; squamous cell carcinoma; squamous neck cancer; stomach (gastric) cancer; supratentorial primitive neuroectodermal tumors; T-cell lymphoma; testicular cancer; throat cancer; thymic carcinoma; thymoma; thyroid cancer; transitional cell cancer; transitional cell cancer of the renal pelvis and ureter; trophoblastic tumor; ureter cancer; urethral cancer; uterine cancer; uterine sarcoma; vaginal cancer; vulvar cancer; Waldenstrom macroglobulinemia; or Wilm's tumor. The premalignant condition can include without limitation Barrett's Esophagus. The autoimmune disease can include without limitation one of inflammatory bowel disease (IBD), Crohn's disease (CD), ulcerative colitis (UC), pelvic inflammation, vasculitis, psoriasis, diabetes, autoimmune hepatitis, multiple sclerosis, myasthenia gravis, Type I diabetes, rheumatoid arthritis, psoriasis, systemic lupus erythematosis (SLE), Hashimoto's Thyroiditis, Grave's disease, Ankylosing Spondylitis Sjogrens Disease, CREST syndrome, Scleroderma, Rheumatic Disease, organ rejection, Primary Sclerosing Cholangitis, or sepsis. The cardiovascular disease can include without limitation one of atherosclerosis, congestive heart failure, vulnerable plaque, stroke, ischemia, high blood pressure, stenosis, vessel occlusion or a thrombotic event. The neurological disease can include without limitation one of Multiple Sclerosis (MS), Parkinson's Disease (PD), Alzheimer's Disease (AD), schizophrenia, bipolar disorder, depression, autism, Prion Disease, Pick's disease, dementia, Huntington disease (HD), Down's syndrome, cerebrovascular disease, Rasmussen's encephalitis, viral meningitis, neurospsychiatric systemic lupus erythematosus (NPSLE), amyotrophic lateral sclerosis, Creutzfeldt-Jacob disease, Gerstmann-Straussler-Scheinker disease, transmissible spongiform encephalopathy, ischemic reperfusion damage (e.g. stroke), brain trauma, microbial infection, or chronic fatigue syndrome. The pain can include without limitation one of fibromyalgia, chronic neuropathic pain, or peripheral neuropathic pain. The infectious disease can include without limitation one of a bacterial infection, viral infection, yeast infection, Whipple's Disease, Prion Disease, cirrhosis, methicillin-resistant staphylococcus aureus, HIV, HCV, hepatitis, syphilis, meningitis, malaria, tuberculosis, or influenza. One of skill will appreciate that oligonucleotide probes or plurality of oligonucleotides or methods of the invention can be used to assess any number of these or other related diseases and disorders.

[0393] In a related aspect, the invention provides a kit comprising a reagent for carrying out the methods herein. In still another related aspect, the invention provides for use of a reagent for carrying out the methods. The reagent may comprise at least one binding agent to the at least one protein. The binding agent may be an oligonucleotide probe as provided herein.

[0394] Sample Characterization

[0395] The aptamers of the invention can be used to characterize a biological sample. For example, an aptamer can be used to bind a biomarker in the sample. The presence or level of the bound biomarker can indicate a characteristic of the example, such as a diagnosis, prognosis or theranosis of a disease or disorder associated with the sample.

[0396] In an aspect, the invention provides an aptamer comprising a nucleic acid sequence that is at least about 50, 55, 60, 65, 70, 75, 80, 85, 90, 95, 96, 97, 98, 99 or 100 percent homologous of any of: a) SEQ ID NOs. 11-24 or a sequence in Table 8; a) SEQ ID NOs. 25-44 or a sequence in Table 11; b) SEQ ID NOs. 47-130 or a sequence in Table 12; or c) a functional variation or fragment of any preceding sequence. A functional variation or fragment includes a sequence comprising modifications that is still capable of binding a target molecule, wherein the modifications comprise without limitation at least one of a deletion, insertion, point mutation, truncation or chemical modification. In a related aspect, the invention provides a method of characterizing a disease or disorder, comprising: (a) contacting a biological test sample with one or more aptamer of the invention, e.g., any of those in this paragraph or modifications thereof; (b) detecting a presence or level of a complex between the one or more aptamer and the target bound by the one or more aptamer in the biological test sample formed in step (a); (c) contacting a biological control sample with the one or more aptamer; (d) detecting a presence or level of a complex between the one or more aptamer and the target bound by the one or more aptamer in the biological control sample formed in step (c); and (e) comparing the presence or level detected in steps (b) and (d), thereby characterizing the disease or disorder.

[0397] The biological test sample and biological control sample can each comprise a tissue sample, a cell culture, or a biological fluid. In some embodiments, the biological test sample and biological control sample comprise the same sample type, e.g., both are tissue samples or both are fluid samples. In other embodiments, different sample types may be used for the test and control samples. For example, the control sample may comprise an engineered or otherwise artificial sample.

[0398] The biological fluid may comprise a bodily fluid. The bodily fluid may include without limitation one or more of peripheral blood, sera, plasma, ascites, urine, cerebrospinal fluid (CSF), sputum, saliva, bone marrow, synovial fluid, aqueous humor, amniotic fluid, cerumen, breast milk, broncheoalveolar lavage fluid, semen, prostatic fluid, cowper's fluid or pre-ejaculatory fluid, female ejaculate, sweat, fecal matter, hair, tears, cyst fluid, pleural and peritoneal fluid, pericardial fluid, lymph, chyme, chyle, bile, interstitial fluid, menses, pus, sebum, vomit, vaginal secretions, mucosal secretion, stool water, pancreatic juice, lavage fluids from sinus cavities, bronchopulmonary aspirates, blastocyl cavity fluid, or umbilical cord blood. In some embodiments, the bodily fluid comprises blood, serum or plasma.

[0399] The biological fluid may comprise microvesicles. For example, the biological fluid can be a tissue, cell culture, or bodily fluid which comprises microvesicles released from cells in the sample. The microvesicles can be circulating microvesicles.

[0400] The one or more aptamer can bind a target biomarker, e.g., a biomarker useful in characterizing the sample. The biomarker may comprise a polypeptide or fragment thereof, or other useful biomarker described herein or known in the art (lipid, carbohydrate, complex, nucleic acid, etc). In embodiments, the polypeptide or fragment thereof is soluble or membrane bound. Membrane bound polypeptides may comprise a cellular surface antigen or a microvesicle surface antigen. The biomarker can be a biomarker selected from Table 3 or Table 4.

[0401] The characterizing can comprises a diagnosis, prognosis or theranosis of the disease or disorder. Various diseases and disorders can be characterized using the compositions and methods of the invention, including without limitation a cancer, a premalignant condition, an inflammatory disease, an immune disease, an autoimmune disease or disorder, a cardiovascular disease or disorder, a neurological disease or disorder, an infectious disease, and/or pain. See, e.g., section herein “Phenotypes” for further details. In embodiments, the disease or disorder comprises a proliferative or neoplastic disease or disorder. For example, the disease or disorder can be a cancer. In some embodiments, the cancer comprises a breast cancer, ovarian cancer, prostate cancer, lung cancer, colorectal cancer, melanoma, or brain cancer.

[0402] FIG. 19A is a schematic 1900 showing an assay configuration that can be used to detect and/or quantify a target of interest using one or more aptamer of the invention. Capture aptamer 1902 is attached to substrate 1901. The substrate can be a planar substrate, well, microbead, or other useful substrate as disclosed herein or known in the art. Target of interest 1903 is bound by capture aptamer 1902. The target of interest can be any appropriate entity that can be detected when recognized by an aptamer or other binding agent. The target of interest may comprise a protein or polypeptide, a nucleic acid, including DNA, RNA, and various subspecies thereof, a lipid, a carbohydrate, a complex, e.g., a complex comprising protein, nucleic acids, lipids and/or carbohydrates. In some embodiments, the target of interest comprises a microvesicle. The target of interest can be a microvesicle surface antigen. The target of interest may be a biomarker, including a vesicle associated biomarker, in Tables 3 or 4. The microvesicle input can be isolated from a sample using various techniques as described herein, e.g., chromatography, filtration, centrifugation, flow cytometry, affinity capture (e.g., to a planar surface, column or bead), and/or using microfluidics. Detection aptamer 1904 is also bound to target of interest 1903. Detection aptamer 1904 carries label 1905 which can be detected to identify target captured to substrate 1901 via capture aptamer 1902. The label can be a fluorescent, radiolabel, enzyme, or other detectable label as disclosed herein. Either capture aptamer 1902 or detection aptamer 1904 can be substituted with another binding agent, e.g., an antibody. For example, the target may be captured with an antibody and detected with an aptamer, or vice versa. When the target of interest comprises a complex, the capture and detection agents (aptamer, antibody, etc) can recognize the same or different targets. For example, when the target is a microvesicle, the capture agent may recognize one microvesicle surface antigen while the detection agent recognizes another microvesicle surface antigen. Alternately, the capture and detection agents can recognize the same surface antigen.

[0403] The aptamers of the invention may be identified and/or used for various purposes in the form of DNA or RNA. Unless otherwise specified, one of skill in the art will appreciate that an aptamer may generally be synthesized in various forms of nucleic acid. The aptamers may also carry various chemical modifications and remain within the scope of the invention.

[0404] In some embodiments, an aptamer of the invention is modified to comprise at least one chemical modification. The modification may include without limitation a chemical substitution at a sugar position; a chemical substitution at a phosphate position; and a chemical substitution at a base position of the nucleic acid. In some embodiments, the modification is selected from the group consisting of: biotinylation, incorporation of a fluorescent label, incorporation of a modified nucleotide, a 2′-modified pyrimidine, 3′ capping, conjugation to an amine linker, conjugation to a high molecular weight, non-immunogenic compound, conjugation to a lipophilic compound, conjugation to a drug, conjugation to a cytotoxic moiety, and labeling with a radioisotope, or other modification as disclosed herein. The position of the modification can be varied as desired. For example, the biotinylation, fluorescent label, or cytotoxic moiety can be conjugated to the 5′ end of the aptamer. The biotinylation, fluorescent label, or cytotoxic moiety can also be conjugated to the 3′ end of the aptamer.

[0405] In some embodiments, the cytotoxic moiety is encapsulated in a nanoparticle. The nanoparticle can be selected from the group consisting of: liposomes, dendrimers, and comb polymers. In other embodiments, the cytotoxic moiety comprises a small molecule cytotoxic moiety. The small molecule cytotoxic moiety can include without limitation vinblastine hydrazide, calicheamicin, vinca alkaloid, a cryptophycin, a tubulysin, dolastatin-10, dolastatin-15, auristatin E, rhizoxin, epothilone B, epithilone D, taxoids, maytansinoids and any variants and derivatives thereof. In still other embodiments, the cytotoxic moiety comprises a protein toxin. For example, the protein toxin can be selected from the group consisting of diphtheria toxin, ricin, abrin, gelonin, and Pseudomonas exotoxin A. Non-immunogenic, high molecular weight compounds for use with the invention include polyalkylene glycols, e.g., polyethylene glycol. Appropriate radioisotopes include yttrium-90, indium-111, iodine-131, lutetium-177, copper-67, rhenium-186, rhenium-188, bismuth-212, bismuth-213, astatine-211, and actinium-225. The aptamer may be labeled with a gamma-emitting radioisotope.

[0406] In some embodiments of the invention, an active agent is conjugated to the aptamer. For example, the active agent may be a therapeutic agent or a diagnostic agent. The therapeutic agent may be selected from the group consisting of tyrosine kinase inhibitors, kinase inhibitors, biologically active agents, biological molecules, radionuclides, adriamycin, ansamycin antibiotics, asparaginase, bleomycin, busulphan, cisplatin, carboplatin, carmustine, capecotabine, chlorambucil, cytarabine, cyclophosphamide, camptothecin, dacarbazine, dactinomycin, daunorubicin, dexrazoxane, docetaxel, doxorubicin, etoposide, epothilones, floxuridine, fludarabine, fluorouracil, gemcitabine, hydroxyurea, idarubicin, ifosfamide, irinotecan, lomustine, mechlorethamine, mercaptopurine, melphalan, methotrexate, rapamycin (sirolimus), mitomycin, mitotane, mitoxantrone, nitrosurea, paclitaxel, pamidronate, pentostatin, plicamycin, procarbazine, rituximab, streptozocin, teniposide, thioguanine, thiotepa, taxanes, vinblastine, vincristine, vinorelbine, taxol, combretastatins, discodermolides, transplatinum, anti-vascular endothelial growth factor compounds (“anti-VEGFs”), anti-epidermal growth factor receptor compounds (“anti-EGFRs”), 5-fluorouracil and derivatives, radionuclides, polypeptide toxins, apoptosis inducers, therapy sensitizers, enzyme or active fragment thereof, and combinations thereof.

[0407] Oligonucleotide Pools to Characterize a Sample

[0408] The complexity and heterogeneity present in biology challenges the understanding of biological systems and disease. Diversity exists at various levels, e.g., within and between cells, tissues, individuals and disease states. See, e.g., FIG. 20A. FIG. 20B overviews various biological entities that can be assessed to characterize such samples. As shown in the Figure, as one moves from assessing DNA, to RNA, to protein, and finally to protein complexes, the amount of diversity and complexity increases dramatically. The oligonucleotide probe library method of the invention can be used characterize complex biological sources, e.g., tissue samples, cells, circulating tumor cells, microvesicles, and complexes such as protein and proteolipid complexes.

[0409] Current methods to characterize biological samples may not adequately address such complexity and diversity. As shown in FIG. 20C, such current methods often have a trade off between measuring diversity and complexity. As an example, consider high throughput sequencing technology. Next generation approaches may query many 1000s of molecular targets in a single assay. However, such approaches only probe individual DNA and/or RNA molecules, and thus miss out on the great diversity of proteins and biological complexes. On the other hand, flow cytometry can probe biological complexes, but are limited to a small number of pre-defined ligands. For example, a single assay can probe a handful of differentially labeled antibodies to pre-defined targets.

[0410] The oligonucleotide probe library of the invention address the above challenges with current biological detection technologies. The size of the starting library can be adjusted to measure as many different entities as there are library members. In this Example, the initial untrained oligonucleotide library has the potential to measure 10¹² or more biological features. A larger and/or different library can be constructed as desired. The technology is adapted to find differences between samples without assumptions about what “should be different.” For example, the probe library may distinguish based on individual proteins, protein modifications, protein complexes, lipids, nucleic acids, different folds or conformations, or whatever is there that distinguishes a sample of interest. Thus, the method provides an unbiased approach to identify differences in biological samples that can be used to identify different populations of interest.

[0411] In the context herein, the use of the oligonucleotide library probe to assess a sample may be referred to as Adaptive Dynamic Artificial Poly-ligand Targeting, or ADAPT™ (previously referred to as Topological Oligonucleotide Profiling: TOP™). Although as noted the terms aptamer and oligonucleotides are typically used interchangeable herein, some differences between “classic” individual aptamers and ADAPT probes are as follows. Individual aptamers may comprise individual oligonucleotides selected to bind to a known specific target in an antibody-like “key-in-lock” binding mode. They may be evaluated individually based on specificity and binding affinity to the intended target. However, ADAPT probes may comprise a library of oligonucleotides intended to produce multi-probe signatures. The ADAPT probes comprise numerous potential binding modalities (electrostatic, hydrophobic, Watson-Crick, multi-oligo complexes, etc.). The ADAPT probe signatures have the potential to identify heterogeneous patient subpopulations. For example, a single ADAPT probe library can be assembled to differentiate multiple disease states, as demonstrated herein. Unlike classic single aptamers, the binding targets may or may not be isolated or identified. It will be understood that screening methods that identify individual aptamers, e.g., SELEX, can also be used to enrich a naive library of oligonucleotides to identify a ADAPT probe library.

[0412] The general method of the invention is outlined in FIG. 20D. One input to the method comprises a randomized oligonucleotide library with the potential to measure 10¹² or more biological features. As outlined in the figure, the method identifies a desired number (e.g., ˜10⁵-10⁶) that are different between two input sample types. The randomized oligonucleotide library is contacted with a first and a second sample type, and oligonucleotides that bind to each sample are identified. The bound oligonucleotide populations are compared and oligonucleotides that specifically bind to one or the other biological input sample are retained for the oligonucleotide probe library, whereas oligonucleotides that bind both biological input samples are discarded. This trained oligonucleotide probe library can then be contacted with a new test sample and the identities of oligonucleotides that bind the test sample are determined. The test sample is characterized based on the profile of oligonucleotides that bound. See, e.g., FIG. 20H.

[0413] Extracellular vesicles provide an attractive vehicle to profile the biological complexity and diversity driven by many inter-related sources. There can be a great deal of heterogeneity between patient-to-patient microvesicle populations, or even in microvesicle populations from a single patient under different conditions (e.g., stress, diet, exercise, rest, disease, etc). Diversity of molecular phenotypes within microvesicle populations in various disease states, even after microvesicle isolation and sorting by vesicle biomarkers, can present challenges identifying surface binding ligands. This situation is further complicated by vesicle surface-membrane protein complexes. The oligonucleotide probe library can be used to address such challenges and allow for characterization of biological phenotypes. The approach combines the power of diverse oligonucleotide libraries and high throuput (next-generation) sequencing technologies to probe the complexity of extracellular microvesicles. See FIG. 20E.

[0414] ADAPT™ profiling may provide quantitative measurements of dynamic events in addition to detection of presence/absence of various biomarkers in a sample. For example, the binding probes may detect protein complexes or other post-translation modifications, allowing for differentiation of samples with the same proteins but in different biological configurations. Such configurations are illustrated in FIGS. 20F-G. In FIG. 20F, microvesicles with various surface markers are shown from an example microvesicle sample population: Sample Population A. The indicated Bound Probing Oligonucleotides 2001 are contacted to two surface markers 2002 and 2003 in a given special relationship. Here, probes unique to these functional complexes and spatial relationships may be retained. In contrast, in microvesicle Sample Population B shown in FIG. 20F, the two surface markers 2002 and 2003 are found in disparate spatial relationship. Here, probes 2001 are not bound due to absence of the spatial relationship of the interacting components 2002 and 2003.

[0415] An illustrative approach 2010 for using ADAPT profiling to assess a sample is shown in FIG. 20H. The probing library 2011 is mixed with sample 2012. The sample can be as described herein, e.g., a bodily fluid from a subject having or suspected of having a disease. The probes are allowed to bind the sample 2020 and the microvesicles are pelleted 2015. The supernatant 2014 comprising unbound oligonucleotides is discarded. Oligonucleotide probes bound to the pellet 2015 are eluted 2016 and sequenced 2017. The profile 2018 generated by the bound oligonucleotide probes as determined by the sequencing 2017 is used to characterize the sample 2012. For example, the profile 2018 can be compared to a reference, e.g., to determine if the profile is similar or different from a reference profile indicative of a disease or healthy state, or other phenotypic characterization of interest. The comparison may indicate the presence of a disease, provide a diagnosis, prognosis or theranosis, or otherwise characterize a phenotype associated with the sample 2012. FIG. 20I illustrates another schematic for using TOP™ profiling to characterize a phenotype. A patient sample such as a bodily fluid disclosed herein is collected 2021. The sample is contacted with the ADAPT™ library pool 2022. Microvesicles (MVs) are isolated from the contacted sample 2023, e.g., using ultracentrifugation, filtration, polymer precipitation or other appropriate technique or combination of techniques disclosed herein. Oligonucleotides that bound the isolated microvesicles are collected and identity is determined 2024. The identity of the bound oligonucleotides can be determined by any useful technique such as sequencing, high throughput sequencing (e.g., NGS), amplification including without limitation qPCR, or hybridization such as to a planar or particle based array. The identity of the bound oligonucleotides is used to characterize the sample, e.g., as containing disease related microvesicles.

[0416] In an aspect, the invention provides a method of characterizing a sample by contacting the sample with a pool of different oligonucleotides (e.g., an aptamer pool), and determining the frequency at which various oligonucleotides in the pool bind the sample. For example, a pool of oligonucleotides is identified that preferentially bind to microvesicles from cancer patients as compared to non-cancer patients. A test sample, e.g., from a patient suspected of having the cancer, is collected and contacted with the pool of oligonucleotides. Oligonucleotides that bind the test sample are eluted from the test sample, collected and identified, and the composition of the bound oligonucleotides is compared to those known to bind cancer samples. Various sequencing, amplification and hybridization techniques can be used to identify the eluted oligonucleotides. For example, when a large pool of oligonucleotides is used, oligonucleotide identification can be performed by high throughput methods such as next generation sequencing or via hybridization. If the test sample is bound by the oligonucleotide pool in a similar manner (e.g., as determined by bioinformatics classification methods) to the microvesicles from cancer patients, then the test sample is indicative of cancer as well. Using this method, a pool of oligonucleotides that bind one or more microvesicle antigen can be used to characterize the sample without necessarily knowing the precise target of each member of the pool of oligonucleotides. Examples 26-30 and others herein illustrate embodiments of the invention.

[0417] In an aspect, the invention provides a method for characterizing a condition for a test sample comprising: contacting a microvesicle sample with a plurality of oligonucleotide capable of binding one or more target(s) present in said microvesicle sample, identifying a set of oligonucleotides that form a complex with the sample wherein the set is predetermined to characterize a condition for the sample, thereby characterizing a condition for a sample.

[0418] In an related aspect, the invention provides a method for identifying a set of oligonucleotides associated with a test sample, comprising: (a) contacting a microvesicle sample with a plurality of oligonucleotides, isolating a set of oligonucleotides that form a complex with the microvesicle sample, (b) determining sequence and/or copy number for each of the oligonucleotides, thereby identifying a set of oligonucleotides associated with the test sample.

[0419] In still another related aspect, the invention provides a method of diagnosing a sample as cancerous or predisposed to be cancerous, comprising contacting a microvesicle sample with a plurality of oligonucleotides that are predetermined to preferentially form a complex with microvesicles from a cancer sample as compared to microvesicles from a non-cancer sample.

[0420] The oligonucleotides can be identified by sequencing, e.g., by dye termination (Sanger) sequencing or high throughput methods. High throughput methods can comprise techniques to rapidly sequence a large number of nucleic acids, including next generation techniques such as Massively parallel signature sequencing (MPSS; Polony sequencing; 454 pyrosequencing; Illumina (Solexa) sequencing; SOLiD sequencing; Ion Torrent semiconductor sequencing; DNA nanoball sequencing; Heliscope single molecule sequencing; Single molecule real time (SMRT) sequencing, or other methods such as Nanopore DNA sequencing; Tunnelling currents DNA sequencing; Sequencing by hybridization; Sequencing with mass spectrometry; Microfluidic Sanger sequencing; Microscopy-based techniques; RNAP sequencing; In vitro virus high-throughput sequencing. The oligonucleotides may also be identified by hybridization techniques. For example, a microarray having addressable locals to hybridize and thereby detect the various members of the pool can be used. Alternately, detection can be based on one or more differentially labelled oligonucleotides that hybridize with various members of the oligonucleotide pool. The detectable signal of the label can be associated with a nucleic acid molecule that hybridizes with a stretch of nucleic acids present in various oligonucleotides. The stretch can be the same or different as to one or more oligonucleotides in a library. The detectable signal can comprise fluorescence agents, including color-coded barcodes which are known, such as in U.S. Patent Application Pub. No. 20140371088, 2013017837, and 20120258870. Other detectable labels (metals, radioisotopes, etc) can be used as desired.

[0421] The plurality or pool of oligonucleotides can comprise any desired number of oligonucleotides to allow characterization of the sample. In various embodiments, the pool comprises at least 2, 3, 4, 5, 6, 7, 8, 9, 10, 11, 12, 13, 14, 15, 16, 17, 18, 19, 20, 25, 30, 40, 50, 60, 70, 80, 90, 100, 150, 200, 250, 300, 350, 400, 450, 500, 600, 700, 800, 900, 1000, 2000, 3000, 4000, 5000, 6000, 7000, 8000, 9000, or at least 10000 different oligonucleotide members.

[0422] The plurality of oligonucleotides can be pre-selected through one or more steps of positive or negative selection, wherein positive selection comprises selection of oligonucleotides against a sample having substantially similar characteristics compared to the test sample, and wherein negative selection comprises selection of oligonucleotides against a sample having substantially different characteristics compared to the test sample. Substantially similar characteristics mean that the samples used for positive selection are representative of the test sample in one or more characteristic of interest. For example, the samples used for positive selection can be from cancer patients or cell lines and the test sample can be a sample from a patient having or suspected to have a cancer. Substantially different characteristics mean that the samples used for negative selection differ from the test sample in one or more characteristic of interest. For example, the samples used for negative selection can be from individuals or cell lines that do not have cancer (e.g., “normal” or otherwise “control” samples) and the test sample can be a sample from a patient having or suspected to have a cancer. The cancer can be a breast cancer, ovarian cancer, prostate cancer, lung cancer, colorectal cancer, melanoma, brain cancer, or other cancer.

[0423] By selecting samples representative of the desired phenotypes to detect and/or distinguish, the characterizing can comprise a diagnosis, prognosis or theranosis for any number of diseases or disorders. Various diseases and disorders can be characterized using the compositions and methods of the invention, including without limitation a cancer, a premalignant condition, an inflammatory disease, an immune disease, an autoimmune disease or disorder, a cardiovascular disease or disorder, a neurological disease or disorder, an infectious disease, and/or pain. See, e.g., section herein “Phenotypes” for further details. In embodiments, the disease or disorder comprises a proliferative or neoplastic disease or disorder. For example, the disease or disorder can be a cancer. In some embodiments, the cancer comprises a breast cancer, ovarian cancer, prostate cancer, lung cancer, colorectal cancer, melanoma, or brain cancer.

[0424] FIG. 19B is a schematic 1910 showing use of an oligonucleotide pool to characterize a phenotype of a sample, such as those listed above. A pool of oligonucleotides to a target of interest is provided 1911. For example, the pool of oligonucleotides can be enriched to target one or more microvesicle. The members of the pool may bind different targets (e.g., a microvesicle surface antigen) or different epitopes of the same target present on the one or more microvesicle. The pool is contacted with a test sample to be characterized 1912. For example, the test sample may be a biological sample from an individual having or suspected of having a given disease or disorder. The mixture is washed to remove unbound oligonucleotides. The remaining oligonucleotides are eluted or otherwise disassociated from the sample and collected 1913. The collected oligonucleotides are identified, e.g., by sequencing or hybridization 1914. The presence and/or copy number of the identified is used to characterize the phenotype 1915. For example, the pool of oligonucleotides may be chosen as oligonucleotides that preferentially recognize microvesicles shed from cancer cells. The method can be employed to detect whether the sample retains oligonucleotides that bind the cancer-related microvesicles, thereby allowing the sample to be characterized as cancerous or not.

[0425] FIG. 19C is a schematic 1920 showing an implementation of the method in FIG. 19B. A pool of oligonucleotides identified as binding a microvesicle population is provided 1919. The input sample comprises a test sample comprising microvesicles 1922. For example, the test sample may be a biological sample from an individual having or suspected of having a given disease or disorder. The pool is contacted with the isolated microvesicles to be characterized 1923. The microvesicle population can be isolated before or after the contacting 1923 from the sample using various techniques as described herein, e.g., chromatography, filtration, ultrafiltration, centrifugation, ultracentrifugation, flow cytometry, affinity capture (e.g., to a planar surface, column or bead), polymer precipitation, and/or using microfluidics. The mixture is washed to remove unbound oligonucleotides and the remaining oligonucleotides are eluted or otherwise disassociated from the sample and collected 1924. The collected oligonucleotides are identified 1925 and the presence and/or copy number of the retained oligonucleotides is used to characterize the phenotype 1926 as above.

[0426] As noted, in embodiment of FIG. 19C, the pool of oligonucleotides 1919 is directly contacted with a biological sample that comprises or is expected to comprise microvesicles. Microvesicles are thereafter isolated from the sample and the mixture is washed to remove unbound oligonucleotides and the remaining oligonucleotides are disassociated and collected 1924. The following steps are performed as above. As an example of this alternate configuration, a biological sample, e.g., a blood, serum or plasma sample, is directly contacted with the pool of oligonucleotides. Microvesicles are then isolated by various techniques disclosed herein, including without limitation ultracentrifugation, ultrafiltration, flow cytometry, affinity isolation, polymer precipitation, chromatography, various combinations thereof, or the like. Remaining oligonucleotides are then identified, e.g., by sequencing, hybridization or amplification.

[0427] In a related aspect, the invention provides a composition of matter comprising a plurality of oligonucleotides that can be used to carry out the methods comprising use of an oligonucleotide pool to characterize a phenotype. The plurality of oligonucleotides can comprise any of those described herein.

[0428] In a related aspect, the invention provides a method of performing high-throughput sequencing comprising: performing at least one (i) negative selection or (ii) one positive selection of a plurality of oligonucleotides with a microvesicle sample; obtaining a set of oligonucleotides to provide a negative binder subset or positive binder subset of the plurality of oligonucleotides, wherein the negative binder subset of the plurality of oligonucleotides does not bind the microvesicle sample and wherein the positive binder subset of the plurality of oligonucleotides does bind the microvesicle sample; contacting the negative binder subset or positive binder subset with a test sample; eluting oligonucleotides that bound to the test sample to provide a plurality of eluate oligonucleotides; and performing high-throughput sequencing of the plurality of eluate oligonucleotides to identify sequence and/or copy number of the members of the plurality of eluate oligonucleotides. Negative and positive selection of the plurality of oligonucleotides using microvesicle sample can be performed as disclosed herein. The oligonucleotide profile revealed by the sequence and/or copy number of the members of the plurality of eluate oligonucleotides can be used to characterize a phenotype of the test sample as described herein.

[0429] In a similar aspect, the invention provides a method for identifying oligonucleotides specific for a test sample. The method comprises: (a) enriching a plurality of oligonucleotides for a sample to provide a set of oligonucleotides predetermined to form a complex with a target sample; (b) contacting the plurality in (a) with a test sample to allow formation of complexes of oligonucleotides with test sample; (c) recovering oligonucleotides that formed complexes in (b) to provide a recovered subset of oligonucleotides; and (d) profiling the recovered subset of oligonucleotides by high-throughput sequencing or hybridization, thereby identifying oligonucleotides specific for a test sample. The test sample may comprise a plurality of microvesicles. The oligonucleotides may comprise RNA, DNA or both. In some embodiment, the method further comprises performing informatics analysis to identify a subset of oligonucleotides comprising sequence identity of at least 50%, 55%, 60%, 65%, 70%, 75%, 80%, 85%, 90%, 91%, 92%, 93%, 94%, 95%, 96%, 97%, 98%, or at least 99% to the oligonucleotides predetermined to form a complex with the target sample.

[0430] One of skill will appreciate that the method can be used to identify any appropriate target, including those not associated with a microvesicle. The target can be any useful target, including without limitation a cell, an organelle, a protein complex, a lipoprotein, a carbohydrate, a microvesicle, a virus, a membrane fragment, a small molecule, a heavy metal, a toxin, a drug, a nucleic acid (including without limitation microRNA (miR) and messenger RNA (mRNA)), a protein-nucleic acid complex, and various combinations, fragments and/or complexes of any of these. The target can, e.g., comprise a mixture of microvesicles and non-microvesicle entities.

[0431] In an aspect, the invention also provides a method comprising contacting an oligonucleotide or plurality of oligonucleotides with a sample and detecting the presence or level of binding of the oligonucleotide or plurality of oligonucleotides to a target in the sample, wherein the oligonucleotide or plurality of oligonucleotides can be those provided by the invention above. The sample may comprise a biological sample, an organic sample, an inorganic sample, a tissue, a cell culture, a bodily fluid, blood, serum, a cell, a microvesicle, a protein complex, a lipid complex, a carbohydrate, or any combination, fraction or variation thereof. The target may comprise a cell, an organelle, a protein complex, a lipoprotein, a carbohydrate, a microvesicle, a membrane fragment, a small molecule, a heavy metal, a toxin, or a drug.

[0432] In a related aspect, the invention provides a method comprising: a) contacting a biological sample comprising microvesicles with an oligonucleotide probe library, wherein optionally the oligonucleotide probe library comprises an oligonucleotide or plurality of oligonucleotides those provided by the invention above; b) identifying oligonucleotides bound to at least a portion of the microvesicles; and c) characterizing the sample based on a profile of the identified oligonucleotides.

[0433] In another aspect, the invention provides a method comprising: a) contacting a sample with an oligonucleotide probe library comprising at least 10⁶, 10⁷, 10⁸, 10⁹, 10¹⁰, 10¹¹, 10¹², 10¹³, 10¹⁴, 10¹⁵, 10¹⁶, 10¹⁷, or at least 10¹⁸ different oligonucleotide sequences oligonucleotides to form a mixture in solution, wherein the oligonucleotides are capable of binding a plurality of entities in the sample to form complexes, wherein optionally the oligonucleotide probe library comprises an oligonucleotide or plurality of oligonucleotides as provided by the invention above; b) partitioning the complexes formed in step (a) from the mixture; and c) detecting oligonucleotides present in the complexes partitioned in step (b) to identify an oligonucleotide profile for the sample. In an embodiment, the detecting step comprises performing sequencing of all or some of the oligonucleotides in the complexes, amplification of all or some of the oligonucleotides in the complexes, and/or hybridization of all or some of the oligonucleotides in the complexes to an array. The array can be any useful array, such as a planar or particle-based array.

[0434] In still another aspect, the invention provides a method for generating an enriched oligonucleotide probe library comprising: a) contacting a first oligonucleotide library with a biological test sample and a biological control sample, wherein complexes are formed between biological entities present in the biological samples and a plurality of oligonucleotides present in the first oligonucleotide library; b) partitioning the complexes formed in step (a) and isolating the oligonucleotides in the complexes to produce a subset of oligonucleotides for each of the biological test sample and biological control sample; c) contacting the subsets of oligonucleotides in (b) with the biological test sample and biological control sample wherein complexes are formed between biological entities present in the biological samples and a second plurality of oligonucleotides present in the subsets of oligonucleotides to generate a second subset group of oligonucleotides; and d) optionally repeating steps b)-c), one, two, three or more times to produce a respective third, fourth, fifth or more subset group of oligonucleotides, thereby producing the enriched oligonucleotide probe library. In a related aspect, the invention provides a plurality of oligonucleotides comprising at least 2, 3, 4, 5, 6, 7, 8, 9, 10, 11, 12, 13, 14, 15, 16, 17, 18, 19, 20, 25, 30, 40, 45, 50, 55, 60, 65, 70, 75, 80, 85, 90, 95, 100, 125, 150, 175, 200, 300, 400, 500, 600, 700, 800, 900, 1000, 2000, 3000, 4000, 5000, 6000, 7000, 8000, 9000, 10000, 20000, 30000, 40000, 50000, 60000, 70000, 80000, 90000, 100000, 200000, 300000, 400000, or 500000 different oligonucleotide sequences, wherein the plurality results from the method in this paragraph, wherein the library is capable of distinguishing a first phenotype from a second phenotype. In some embodiments, the first phenotype comprises a disease or disorder and the second phenotype comprises a healthy state; or wherein the first phenotype comprises a disease or disorder and the second phenotype comprises a different disease or disorder; or wherein the first phenotype comprises a stage or progression of a disease or disorder and the second phenotype comprises a different stage or progression of the same disease or disorder; or wherein the first phenotype comprises a positive response to a therapy and the second phenotype comprises a negative response to the same therapy.

[0435] In yet another aspect, the invention provides a method of characterizing a disease or disorder, comprising: a) contacting a biological test sample with the oligonucleotide or plurality of oligonucleotides provided by the invention; b) detecting a presence or level of complexes formed in step (a) between the oligonucleotide or plurality of oligonucleotides provided by the invention and a target in the biological test sample; and c) comparing the presence or level detected in step (b) to a reference level from a biological control sample, thereby characterizing the disease or disorder. The step of detecting may comprise performing sequencing of all or some of the oligonucleotides in the complexes, amplification of all or some of the oligonucleotides in the complexes, and/or hybridization of all or some of the oligonucleotides in the complexes to an array. The sequencing may be high-throughput or next generation sequencing.

[0436] In the methods of the invention, the biological test sample and biological control sample may each comprise a tissue sample, a cell culture, or a biological fluid. In some embodiments, the biological fluid comprises a bodily fluid. Useful bodily fluids within the method of the invention comprise peripheral blood, sera, plasma, ascites, urine, cerebrospinal fluid (CSF), sputum, saliva, bone marrow, synovial fluid, aqueous humor, amniotic fluid, cerumen, breast milk, broncheoalveolar lavage fluid, semen, prostatic fluid, cowper's fluid or pre-ejaculatory fluid, female ejaculate, sweat, fecal matter, hair, tears, cyst fluid, pleural and peritoneal fluid, pericardial fluid, lymph, chyme, chyle, bile, interstitial fluid, menses, pus, sebum, vomit, vaginal secretions, mucosal secretion, stool water, pancreatic juice, lavage fluids from sinus cavities, bronchopulmonary aspirates, blastocyl cavity fluid, or umbilical cord blood. In some preferred embodiments, the bodily fluid comprises blood, serum or plasma. The biological fluid may comprise microvesicles. In such case, the complexes may be formed between the oligonucleotide or plurality of oligonucleotides and at least one of the microvesicles.

[0437] The biological test sample and biological control sample may further comprise isolated microvesicles, wherein optionally the microvesicles are isolated using at least one of chromatography, filtration, ultrafiltration, centrifugation, ultracentrifugation, flow cytometry, affinity capture (e.g., to a planar surface, column or bead), polymer precipitation, and using microfluidics. The vesicles can also be isolated after contact with the oligonucleotide or plurality of oligonucleotides.

[0438] In various embodiments of the methods of the invention, the oligonucleotide or plurality of oligonucleotides binds a polypeptide or fragment thereof. The polypeptide or fragment thereof can be soluble or membrane bound, wherein optionally the membrane comprises a microvesicle membrane. The membrane could also be from a cell or a fragment of a cell of vesicle. In some embodiments, the polypeptide or fragment thereof comprises a biomarker in Table 3, Table 4 or any one of Tables 18-25. For example, the polypeptide or fragment thereof could be a general vesicle marker such as in Table 3 or a tissue-related or disease-related marker such as in Table 4, or a vesicle associated biomarker provided in any one of Tables 18-25. The oligonucleotide or plurality of oligonucleotides may bind a microvesicle surface antigen in the biological sample. For example, the oligonucleotide or plurality of oligonucleotides can be enriched from a naïve library against microvesicles.

[0439] As noted above, the microvesicles may be isolated in whole or in part using polymer precipitation. In an embodiment, the polymer comprises polyethylene glycol (PEG). Any appropriate form of PEG may be used. For example, the PEG may be PEG 8000. The PEG may be used at any appropriate concentration. For example, the PEG can be used at a concentration of 1%, 2%, 3%, 4%, 5%, 6%, 7%, 8%, 9%, 10%, 11%, 12%, 13%, 14% or 15% to isolate the microvesicles. In some embodiments, the PEG is used at a concentration of 6%.

[0440] The invention provides oligonucleotide probes that can be used to carry out the methods herein. See, e.g., Examples 26-32. In an aspect, the invention provides an oligonucleotide comprising a sequence according to any one of SEQ ID NOs 137-969 and 1072-4150. In a related aspect, the invention provides an oligonucleotide comprising a sequence according to any one of the SEQ ID NOs in Table 40. In another related aspect, the invention provides an oligonucleotide comprising a sequence according to any one of the SEQ ID NOs in the row “2000v1” in Table 43. In still another related aspect, the invention provides an oligonucleotide comprising a sequence according to any one of the SEQ ID NOs in the row “2000v2” in Table 43. In yet another related aspect, the invention provides an oligonucleotide comprising a sequence according to any one of the SEQ ID NOs in the row “Common” in Table 43.

[0441] The oligonucleotides of the invention can comprise flanking regions for various purposes, including without limitation amplification, capture, conjugation or spacing. For example, the invention provides an oligonucleotide comprising a sequence according to any one of the SEQ ID NOs above and further having a 5′ region with sequence 5′-CTAGCATGACTGCAGTACGT (SEQ ID NO. 131) and/or a 3′ region with sequence 5′-CTGTCTCTTATACACATCTGACGCTGCCGACGA (SEQ ID NO. 132).

[0442] The invention further provides oligonucleotides homologous to the SEQ ID NOs above. For example, the invention provides an oligonucleotide comprising a nucleic acid sequence or a portion thereof that is at least 50, 55, 60, 65, 70, 75, 80, 85, 90, 95, 96, 97, 98, 99 or 100 percent homologous to an oligonucleotide sequence of any one of the SEQ ID NOs above. The homologous sequences may comprise similar properties to the listed sequences, such as similar binding properties.

[0443] In an aspect, the invention provides a plurality of oligonucleotides comprising at least 1, 2, 3, 4, 5, 6, 7, 8, 9, 10, 11, 12, 13, 14, 15, 16, 17, 18, 19, 20, 25, 30, 40, 45, 50, 55, 60, 65, 70, 75, 80, 85, 90, 95, 100, 125, 150, 175, 200, 300, 400, 500, 600, 700, 800, 900, 1000, 2000, 3000, 4000, 5000, 6000, 7000, 8000, 9000, or at least 10000 different oligonucleotide sequences as described in the paragraphs above. For example, the invention provides a plurality of oligonucleotides comprising member sequences having at least 1, 2, 3, 4, 5, 6, 7, 8, 9, 10, 11, 12, 13, 14, 15, 16, 17, 18, 19, 20, 25, 30, 40, 45, 50, 55, 60, 65, 70, 75, 80, 85, 90, 95, 100, 125, 150, 175, 200, 300, 400, 500, 600, 700, 800, 900, 1000, 1500, 2000, 2500, 3000, 3500, 4000, or all variable regions according to SEQ ID NOs 137-969 and 1072-4150.

[0444] The plurality of oligonucleotides can comprise at least 1, 2, 3, 4, 5, 6, 7, 8, 9, 10, 11, 12, 13, 14, 15, 16, 17, 18, 19, 20, 25, 30, 40, 45, 50, 55, 60, 65, 70, 75, or all SEQ ID NOs listed in Table 40. In an embodiment, the plurality of oligonucleotides comprises at least the first 1, 2, 3, 4, 5, 6, 7, 8, 9, 10, 11, 12, 13, 14, 15, 16, 17, 18, 19, 20, 25, 30, 40, 45, 50, 55, 60, 65, 70, 75, or SEQ ID NOs listed in Table 40.

[0445] The plurality of oligonucleotides can also comprise at least 1, 2, 3, 4, 5, 6, 7, 8, 9, 10, 11, 12, 13, 14, 15, 16, 17, 18, 19, 20, 25, 30, 40, 45, 50, 55, 60, 65, 70, 75, 80, 85, 90, 95, 100, 125, 150, 175, 200, 225, 250, 275, 300, or all SEQ ID NOs listed in row “2000v1” of Table 43. In an embodiment, the plurality of oligonucleotides comprises at least the first 1, 2, 3, 4, 5, 6, 7, 8, 9, 10, 11, 12, 13, 14, 15, 16, 17, 18, 19, 20, 25, 30, 40, 45, 50, 55, 60, 65, 70, 75, 80, 85, 90, 95, 100, 125, 150, 175, 200, 225, 250, 275, 300, or all SEQ ID NOs listed in row “2000v1” of Table 43.

[0446] The plurality of oligonucleotides can comprise at least 1, 2, 3, 4, 5, 6, 7, 8, 9, 10, 11, 12, 13, 14, 15, 16, 17, 18, 19, 20, 25, 30, 40, 45, 50, 55, 60, 65, 70, 75, 80, 85, 90, 95, 100, 105, 110, 115, 120, 125, 130, 135, 140, 145 or all SEQ ID NOs listed in row “2000v2” of Table 43. In an embodiment, the plurality of oligonucleotides comprises at least the first 1, 2, 3, 4, 5, 6, 7, 8, 9, 10, 11, 12, 13, 14, 15, 16, 17, 18, 19, 20, 25, 30, 40, 45, 50, 55, 60, 65, 70, 75, 80, 85, 90, 95, 100, 105, 110, 115, 120, 125, 130, 135, 140, 145 or all SEQ ID NOs listed in row “2000v2” of Table 43.

[0447] The plurality of oligonucleotides can also comprise at least 1, 2, 3, 4, 5, 6, 7, 8, 9, 10, 11, 12, 13, 14, 15, 16, 17 or all variable regions listed in row “Common” of Table 43. In an embodiment, the plurality of oligonucleotides comprises at least the first 1, 2, 3, 4, 5, 6, 7, 8, 9, 10, 11, 12, 13, 14, 15, 16, 17 or all SEQ ID NOs listed in row “Common” of Table 43.

[0448] The oligonucleotide or at least one member of the plurality of oligonucleotides can have least one functional modification selected from the group consisting of DNA, RNA, biotinylation, a non-naturally occurring nucleotides, a deletion, an insertion, an addition, and a chemical modification. Such modifications may provide additional or altered functions to the oligonucleotides, including without limitation capture, detection, stability, or binding properties.

[0449] Such oligonucleotides and plurality of oligonucleotides (pools) can be used to characterize a phenotype as described herein. In an aspect, the invention provides a method of characterizing a phenotype in a sample comprising: (a) contacting the sample with at least one oligonucleotide or plurality of oligonucleotides provided by the invention (see above); and (b) identifying a presence or level of a complex formed between the at least one oligonucleotide or plurality of oligonucleotides and the sample, wherein the presence or level is used to characterize the phenotype. Any useful technique for identifying can be used according to the invention. In various embodiments, the identifying comprises sequencing, amplification, hybridization, gel electrophoresis or chromatography. In an embodiment, identifying by hybridization comprises contacting the sample with at least one labeled probe that is configured to hybridize with at least one oligonucleotide. The at least one labeled probe can be directly or indirectly attached to a label. Any useful label can be used, including without limitation a fluorescent or magnetic label. In another embodiment, identifying by sequencing comprises next generation sequencing, dye termination sequencing, and/or pyrosequencing.

[0450] In the methods of the invention, the complex formed between the at least one oligonucleotide or the plurality of oligonucleotides and the sample can be a complex formed between a microvesicle population in the sample and the at least one oligonucleotide or plurality of oligonucleotides. The microvesicle population can be isolated in whole or in part from other constituents in the sample before of after the contacting. In embodiments, the isolating uses affinity purification, filtration, polymer precipitation, PEG precipitation, ultracentrifugation, a molecular crowding reagent, affinity isolation, affinity selection, or any combination thereof.

[0451] In the methods of the invention, the phenotype can be any detectable phenotype. In some embodiments, the phenotype comprises a disease or disorder. In such cases, the characterizing can be a diagnosis, prognosis and/or theranosis for the disease or disorder. The theranosis can be any type of therapy-related such as described herein. The theranosis includes without limitation predicting a treatment efficacy or lack thereof, or monitoring a treatment efficacy.

[0452] The characterizing step of the methods of the invention may entail comparing the presence or level to a reference. Any useful reference can be used. In an embodiment wherein the phenotype comprises a disease or disorder, the reference can be the presence or level determined in a sample from an individual without a disease or disorder, or from an individual with a different state of the disease or disorder. In some embodiments, the comparison to the reference of at least one oligonucleotide comprising a sequence having a SEQ ID NO provided above indicates that the sample comprises a cancer sample or a non-cancer/normal sample.

[0453] The disease or disorder detected by the oligonucleotide, plurality of oligonucleotides, or methods provided here may comprise any appropriate disease or disorder of interest, including without limitation Breast Cancer, Alzheimer's disease, bronchial asthma, Transitional cell carcinoma of the bladder, Giant cellular osteoblastoclastoma, Brain Tumor, Colorectal adenocarcinoma, Chronic obstructive pulmonary disease (COPD), Squamous cell carcinoma of the cervix, acute myocardial infarction (AMI)/acute heart failure, Chron's Disease, diabetes mellitus type II, Esophageal carcinoma, Squamous cell carcinoma of the larynx, Acute and chronic leukemia of the bone marrow, Lung carcinoma, Malignant lymphoma, Multiple Sclerosis, Ovarian carcinoma, Parkinson disease, Prostate adenocarcinoma, psoriasis, Rheumatoid Arthritis, Renal cell carcinoma, Squamous cell carcinoma of skin, Adenocarcinoma of the stomach, carcinoma of the thyroid gland, Testicular cancer, ulcerative colitis, or Uterine adenocarcinoma.

[0454] In some embodiments, the disease or disorder comprises a cancer, a premalignant condition, an inflammatory disease, an immune disease, an autoimmune disease or disorder, a cardiovascular disease or disorder, neurological disease or disorder, infectious disease or pain. The cancer can include without limitation one of acute lymphoblastic leukemia; acute myeloid leukemia; adrenocortical carcinoma; AIDS-related cancers; AIDS-related lymphoma; anal cancer; appendix cancer; astrocytomas; atypical teratoid/rhabdoid tumor; basal cell carcinoma; bladder cancer; brain stem glioma; brain tumor (including brain stem glioma, central nervous system atypical teratoid/rhabdoid tumor, central nervous system embryonal tumors, astrocytomas, craniopharyngioma, ependymoblastoma, ependymoma, medulloblastoma, medulloepithelioma, pineal parenchymal tumors of intermediate differentiation, supratentorial primitive neuroectodermal tumors and pineoblastoma); breast cancer; bronchial tumors; Burkitt lymphoma; cancer of unknown primary site; carcinoid tumor; carcinoma of unknown primary site; central nervous system atypical teratoid/rhabdoid tumor; central nervous system embryonal tumors; cervical cancer; childhood cancers; chordoma; chronic lymphocytic leukemia; chronic myelogenous leukemia; chronic myeloproliferative disorders; colon cancer; colorectal cancer; craniopharyngioma; cutaneous T-cell lymphoma; endocrine pancreas islet cell tumors; endometrial cancer; ependymoblastoma; ependymoma; esophageal cancer; esthesioneuroblastoma; Ewing sarcoma; extracranial germ cell tumor; extragonadal germ cell tumor; extrahepatic bile duct cancer; gallbladder cancer; gastric (stomach) cancer; gastrointestinal carcinoid tumor; gastrointestinal stromal cell tumor; gastrointestinal stromal tumor (GIST); gestational trophoblastic tumor; glioma; hairy cell leukemia; head and neck cancer; heart cancer; Hodgkin lymphoma; hypopharyngeal cancer; intraocular melanoma; islet cell tumors; Kaposi sarcoma; kidney cancer; Langerhans cell histiocytosis; laryngeal cancer; lip cancer; liver cancer; lung cancer; malignant fibrous histiocytoma bone cancer; medulloblastoma; medulloepithelioma; melanoma; Merkel cell carcinoma; Merkel cell skin carcinoma; mesothelioma; metastatic squamous neck cancer with occult primary; mouth cancer; multiple endocrine neoplasia syndromes; multiple myeloma; multiple myeloma/plasma cell neoplasm; mycosis fungoides; myelodysplastic syndromes; myeloproliferative neoplasms; nasal cavity cancer; nasopharyngeal cancer; neuroblastoma; Non-Hodgkin lymphoma; nonmelanoma skin cancer; non-small cell lung cancer; oral cancer; oral cavity cancer; oropharyngeal cancer; osteosarcoma; other brain and spinal cord tumors; ovarian cancer; ovarian epithelial cancer; ovarian germ cell tumor; ovarian low malignant potential tumor; pancreatic cancer; papillomatosis; paranasal sinus cancer; parathyroid cancer; pelvic cancer; penile cancer; pharyngeal cancer; pineal parenchymal tumors of intermediate differentiation; pineoblastoma; pituitary tumor; plasma cell neoplasm/multiple myeloma; pleuropulmonary blastoma; primary central nervous system (CNS) lymphoma; primary hepatocellular liver cancer; prostate cancer; rectal cancer; renal cancer; renal cell (kidney) cancer; renal cell cancer; respiratory tract cancer; retinoblastoma; rhabdomyosarcoma; salivary gland cancer; Sezary syndrome; small cell lung cancer; small intestine cancer; soft tissue sarcoma; squamous cell carcinoma; squamous neck cancer; stomach (gastric) cancer; supratentorial primitive neuroectodermal tumors; T-cell lymphoma; testicular cancer; throat cancer; thymic carcinoma; thymoma; thyroid cancer; transitional cell cancer; transitional cell cancer of the renal pelvis and ureter; trophoblastic tumor; ureter cancer; urethral cancer; uterine cancer; uterine sarcoma; vaginal cancer; vulvar cancer; Waldenstrom macroglobulinemia; or Wilm's tumor. The premalignant condition can include without limitation Barrett's Esophagus. The autoimmune disease can include without limitation one of inflammatory bowel disease (IBD), Crohn's disease (CD), ulcerative colitis (UC), pelvic inflammation, vasculitis, psoriasis, diabetes, autoimmune hepatitis, multiple sclerosis, myasthenia gravis, Type I diabetes, rheumatoid arthritis, psoriasis, systemic lupus erythematosis (SLE), Hashimoto's Thyroiditis, Grave's disease, Ankylosing Spondylitis Sjogrens Disease, CREST syndrome, Scleroderma, Rheumatic Disease, organ rejection, Primary Sclerosing Cholangitis, or sepsis. The cardiovascular disease can include without limitation one of atherosclerosis, congestive heart failure, vulnerable plaque, stroke, ischemia, high blood pressure, stenosis, vessel occlusion or a thrombotic event. The neurological disease can include without limitation one of Multiple Sclerosis (MS), Parkinson's Disease (PD), Alzheimer's Disease (AD), schizophrenia, bipolar disorder, depression, autism, Prion Disease, Pick's disease, dementia, Huntington disease (HD), Down's syndrome, cerebrovascular disease, Rasmussen's encephalitis, viral meningitis, neurospsychiatric systemic lupus erythematosus (NPSLE), amyotrophic lateral sclerosis, Creutzfeldt-Jacob disease, Gerstmann-Straussler-Scheinker disease, transmissible spongiform encephalopathy, ischemic reperfusion damage (e.g. stroke), brain trauma, microbial infection, or chronic fatigue syndrome. The pain can include without limitation one of fibromyalgia, chronic neuropathic pain, or peripheral neuropathic pain. The infectious disease can include without limitation one of a bacterial infection, viral infection, yeast infection, Whipple's Disease, Prion Disease, cirrhosis, methicillin-resistant staphylococcus aureus, HIV, HCV, hepatitis, syphilis, meningitis, malaria, tuberculosis, or influenza. One of skill will appreciate that the oligonucleotide or plurality of oligonucleotides or methods of the invention can be used to assess any number of these or other related diseases and disorders.

[0455] In some embodiments of the invention, the oligonucleotide or plurality of oligonucleotides and methods of use thereof are useful for characterizing certain diseases or disease states. As desired, a pool of oligonucleotides useful for characterizing various diseases is assembled to create a master pool that can be used to probe useful for characterizing the various diseases. One of skill will also appreciate that pools of oligonucleotides useful for characterizing specific diseases or disorders can be created as well. The sequences provided herein can also be modified as desired so long as the functional aspects are still maintained (e.g., binding to various targets or ability to characterize a phenotype). For example, the oligonucleotides may comprise DNA or RNA, incorporate various non-natural nucleotides, incorporate other chemical modifications, or comprise various deletions or insertions. Such modifications may facilitate synthesis, stability, delivery, labeling, etc, or may have little to no effect in practice. In some cases, some nucleotides in an oligonucleotide may be substituted while maintaining functional aspects of the oligonucleotide. Similarly, 5′ and 3′ flanking regions may be substituted. In still other cases, only a portion of an oligonucleotide may be determined to direct its functionality such that other portions can be deleted or substituted. Numerous techniques to synthesize and modify nucleotides and polynucleotides are disclosed herein or are known in the art.

[0456] In an aspect, the invention provides a kit comprising a reagent for carrying out the methods of the invention provided herein. In a similar aspect, the invention contemplates use of a reagent for carrying out the methods of the invention provided herein. In embodiments, the reagent comprises an oligonucleotide or plurality of oligonucleotides. The oligonucleotide or plurality of oligonucleotides can be those provided herein. The reagent may comprise various other useful components including without limitation microRNA (miR) and messenger RNA (mRNA)), a protein-nucleic acid complex, and various combinations, fragments and/or complexes of any of these. The one or more of: a) a reagent configured to isolate a microvesicle, optionally wherein the at least one reagent configured to isolate a microvesicle comprises a binding agent to a microvesicle antigen, a column, a substrate, a filtration unit, a polymer, polyethylene glycol, PEG4000, PEG8000, a particle or a bead; b) at least one oligonucleotide configured to act as a primer or probe in order to amplify, sequence, hybridize or detect the oligonucleotide or plurality of oligonucleotides; and c) a reagent configured to remove one or more abundant protein from a sample, wherein optionally the one or more abundant protein comprises at least one of albumin, immunoglobulin, fibrinogen and fibrin.

[0457] Recovery of Oligonucleotide Probes Post-Probing

[0458] As described herein, the oligonucleotide probes of the invention can be used to probe a sample in order to characterize a phenotype. The methods may entail recovering the oligonucleotide probes that bound various biological entities in the sample in order to identify the bound probes. In an aspect, the invention provides a method of detecting at least one oligonucleotide in a sample, comprising: (a) providing the at least one oligonucleotide comprising a capture moiety; (b) contacting the sample with the at least one oligonucleotide provided in (a); (c) capturing the at least one oligonucleotide that formed a complex with a component in the sample in (b); and (d) identifying a presence or level of the at least one oligonucleotide captured in (c), wherein optionally the presence or level is used to characterize a phenotype. See, e.g., Example 33 and FIGS. 17A-E. The at least one oligonucleotide may be captured to a substrate, including without limitation a bead or planar substrate. The capture moiety can be any useful capture moiety, including without limitation a biotin moiety. The capture moiety can be cleavable, e.g., photocleavable or chemically cleavable. In an embodiment, the at least one oligonucleotide is captured to a substrate coupled to avidin or streptavidin. Such configuration is particularly useful when the capture moiety comprises a biotin moiety. In some embodiments, the captured at least one oligonucleotide is released from the substrate by irradiation prior to the identifying. Any useful irradiation, e.g., ultra violet (UV) light may be used. Any useful technique for identifying can be used according to the invention. In various embodiments, the identifying comprises sequencing, amplification, hybridization, gel electrophoresis or chromatography. In an embodiment, identifying by hybridization comprises contacting the sample with at least one labeled probe that is configured to hybridize with at least one oligonucleotide. The at least one labeled probe can be directly or indirectly attached to a label. Any useful label can be used, including without limitation a fluorescent or magnetic label. In another embodiment, identifying by sequencing comprises next generation sequencing, dye termination sequencing, and/or pyrosequencing. The at least one oligonucleotide can be an oligonucleotide or plurality of oligonucleotides provided by the invention. See e.g., the oligonucleotides and plurality of oligonucleotides described above.

[0459] Single Strand DNA (ssDNA) Library Preparation

[0460] In an embodiment, the invention provides a nucleic acid molecule comprising a 5′ leader region which is 5′ of a variable region, which is 5′ of a tail region, wherein the leader region comprises a lengthener region, a terminator region and a forward primer region, and the tail region comprises a reverse primer region. The nucleic acid molecule may be used for asymmetric or unequal length PCR applications as desired, e.g., to recover ssDNA. See, e.g., Example 34 and FIGS. 18A-C. The lengthener region can be any desired length. In some embodiments, the lengthener region comprises at least 10, 11, 12, 13, 14, 15, 16, 17, 18, 19, 20, 21, 22, 23, 24, 25, 26, 27, 28, 29, 30, 31, 32, 33, 34, 35, 36, 37, 38, 39, 30, 41, 42, 43, 44, 45, 46, 47, 48, 49, or 50 nucleotides. The lengthener region may comprise a poly-A sequence. Similarly, the terminator region can be any desired length. In some embodiments, the terminator region comprises at least 3, 4, 5, 6, 7, 8, 9, 10, 11, 12, 13, 14, 15, 16, 17, 18, 19, 20, 21, 22, 23, 24, 25, 26, 27, 28, 29, 30, 31, 32, 33, 34, 35, 36, 37, 38, 39, 30, 41, 42, 43, 44, 45, 46, 47, 48, 49, or 50 nucleotides. The terminator region may comprise a non-nucleotide terminator. For example, the non-nucleotide terminator can be a polymer such as triethylene glycol or the like. The forward primer region can be any desired length. In some embodiments, the forward primer region comprises at least 10, 11, 12, 13, 14, 15, 16, 17, 18, 19, 20, 21, 22, 23, 24, 25, 26, 27, 28, 29, 30, 31, 32, 33, 34, 35, 36, 37, 38, 39, 30, 41, 42, 43, 44, 45, 46, 47, 48, 49, or 50 nucleotides. The variable region can be any desired length. In some embodiments, the variable region comprises at least 10, 11, 12, 13, 14, 15, 16, 17, 18, 19, 20, 21, 22, 23, 24, 25, 26, 27, 28, 29, 30, 31, 32, 33, 34, 35, 36, 37, 38, 39, 30, 41, 42, 43, 44, 45, 46, 47, 48, 49, or 50 nucleotides. In some embodiments, the variable region binds a target molecule or complex through non-Watson-Crick base pairing. For example, the variable region may act as an aptamer and bind proteins or other entities. Finally, the reverse primer region can be any desired length. In some embodiments, the reverse primer region comprises at least 10, 11, 12, 13, 14, 15, 16, 17, 18, 19, 20, 21, 22, 23, 24, 25, 26, 27, 28, 29, 30, 31, 32, 33, 34, 35, 36, 37, 38, 39, 30, 41, 42, 43, 44, 45, 46, 47, 48, 49, or 50 nucleotides.

[0461] In a related aspect, the invention provides a method of generating a single-stranded DNA (ssDNA) molecule comprising: a) providing a mixture comprising a nucleic acid molecule as described in the paragraph above, and forward and reverse primers configured to amplify the nucleic acid molecule from the forward primer region and reverse primer region, respectively; and b) performing asymmetric polymerase chain reaction (PCR) on the mixture in a) to favorably amplify the reverse strand of the nucleic acid molecule, wherein the forward and reverse primers in the mixture are at a ratio of at least about 1:5 (F/R) in favor of the reverse primers; thereby generating the ssDNA molecule. In an embodiment, the ratio is between about 1:20-1:50 (F/R) in favor of the reverse primers. For example, the ratio can be between about 1:37.5 (F/R) in favor of the reverse primers. The method may further comprise isolating the amplified reverse strand of the nucleic acid molecule on a native gel. The method may also further comprise: c) denaturing the amplified nucleic acid molecules from b); and d) isolating the denatured reverse strand of the nucleic acid molecules from c). In an embodiment, the denatured reverse strand of the nucleic acid molecules is isolated on a denaturing gel. The mixture in a) can comprise additional components as desired. For example, the mixture may further comprise at least one of an enrichment buffer, non-target molecules, proteins, microvesicles, and polyethyleve glycol.

[0462] In a related aspect, the invention provides a kit comprising a reagent for carrying out the methods herein. In still another related aspect, the invention provides for use of a reagent for carrying out the methods. In various embodiments, the reagent comprises at least one of a buffer, a nucleic acid molecule described above, and forward and/or reverse primers configured to amplify the nucleic acid molecule.

[0463] Detecting Watson-Crick Base Pairing with an Oligonucleotide Probe

[0464] The oligonucleotide probes provided by the invention can bind via non-Watson Crick base pairing. However, in some cases, the oligonucleotide probes provided by the invention can bind via Watson Crick base pairing. The oligonucleotide probe libraries of the invention, e.g., as described above, can query both types of binding events simultaneously. For example, some oligonucleotide probes may bind the microvesicle protein antigens in the classical aptamer sense, whereas other oligonucleotide probes may bind microvesicles via nucleic acids associated with the microvesicles, e.g., nucleic acid (including without limitation microRNA and mRNA) on the surface of the microvesicles or as payload. Such surface bound nucleic acids can be associated with proteins. For example, they may comprise Argonaute-microRNA complexes. The argonaute protein can be Ago1, Ago2, Ago3 and/or Ago4.

[0465] In addition to the oligonucleotide probe library approach described herein which relies on determining a sequence of the oligonucleotides (e.g., via sequencing, hybridization or amplification), assays can also be designed to detect Watson Crick base pairing. In some embodiments, these approaches rely on Ago2-mediated cleavage wherein an Ago2-microRNA complex can be used to detected using oligonucleotide probes. For further details, see PCT/US15/62184, filed Nov. 23, 2015, which application is incorporated by reference herein in its entirety.

[0466] Kits

[0467] The invention also provides a kit comprising one or more reagent to carry out the methods of the invention. For example, the one or more reagent can be the one or more aptamer, a buffer, blocker, enzyme, or combination thereof. The one or more reagent may comprise any useful reagents for carrying out the subject methods, including without limitation aptamer libraries, substrates such as microbeads or planar arrays or wells, reagents for biomarker and/or microvesicle isolation (e.g., via chromatography, filtration, ultrafiltration, centrifugation, ultracentrifugation, flow cytometry, affinity capture (e.g., to a planar surface, column or bead), polymer precipitation, and/or using microfluidics), aptamers directed to specific targets, aptamer pools that facilitate detection of a biomarker/microvesicle population, reagents such as primers for nucleic acid sequencing or amplification, arrays for nucleic acid hybridization, detectable labels, solvents or buffers and the like, various linkers, various assay components, blockers, and the like. The one or more reagent may also comprise various compositions provided by the invention. In an embodiment, the one or more reagent comprises one or more aptamer of the invention. The one or more reagent can comprise a substrate, such as a planar substrate, column or bead. The kit can contain instructions to carry out various assays using the one or more reagent.

[0468] In an embodiment, the kit comprises an oligonucleotide probe or composition provided herein. The kit can be configured to carry out the methods provided herein. For example, the kit can include an aptamer of the invention, a substrate, or both an aptamer of the invention and a substrate.

[0469] In an embodiment, the kit is configured to carry out an assay. For example, the kit can contain one or more reagent and instructions for detecting the presence or level of a biological entity in a biological sample. In such cases, the kit can include one or more binding agent to a biological entity of interest. The one or more binding agent can be bound to a substrate.

[0470] In an embodiment, the kit comprises a set of oligonucleotides that provide a particular oligonucleotide profile for a biological sample. An oligonucleotide profile can include, without limitation, a profile that can be used to characterize a particular disease or disorder. For example, the disease or disorder can be a proliferative disease or disorder, including without limitation a cancer. In some embodiments, the cancer comprises a breast cancer.

### EXAMPLES

### Example 1: Identification of DNA Oligonucleotides that Bind a Target

[0471] The target is affixed to a solid substrate, such as a glass slide or a magnetic bead. For a magnetic bead preparation, beads are incubated with a concentration of target protein ranging from 0.1 to 1 mg/ml. The target protein is conjugated to the beads according to a chemistry provided by the particular bead manufacturer. Typically, this involves coupling via an N-hydroxysuccinimide (NHS) functional group process. Unoccupied NHS groups are rendered inactive following conjugation with the target.

[0472] Randomly generated oligonucleotides (oligos) of a certain length, such as 32 base pairs long, are added to a container holding the stabilized target. Each oligo contains 6 thymine nucleotides (a “thymine tail”) at either the 5 or 3 prime end, along with a single molecule of biotin conjugated to the thymine tail. Additional molecules of biotin could be added. Each oligo is also manufactured with a short stretch of nucleotides on each end (5-10 base pairs long) corresponding to amplification primers for PCR (“primer tails”). The sequences are shown absent the thymine tails or primer tails.

[0473] The oligonucleotides are incubated with the target at a specified temperature and time in phosphate-buffered saline (PBS) at 37 degrees Celsius in 500 microliter reaction volume.

[0474] The target/oligo combination is washed 1-10 times with buffer to remove unbound oligo. The number of washes increases with each repetition of the process (as noted below).

[0475] The oligos bound to the target are eluted using a buffer containing a chaotropic agent such as 7 M urea or 1% SDS and collected using the biotin tag. The oligos are amplified using the polymerase chain reaction using primers specific to 5′ and 3′ sequences added to the randomized region of the oligos. The amplified oligos are added to the target again for another round of selection. This process is repeated as desired to observe binding enrichment.

### Example 2: Competitive Assay

[0476] The process is performed as in Example 1 above, except that a known ligand to the target, such as an antibody, is used to elute the bound oligo species (as opposed to or in addition to the chaotropic agent). In this case, anti-EpCAM antibody from Santa Cruz Biotechnology, Inc. was used to elute the aptamers from the target EpCAM.

### Example 3: Screening and Affinity Analysis

[0477] All aptamers generated from the binding assays described above are sequenced using a high-throughput sequencing platform, such as the Ion Torrent from Life Technologies:

[0478] Library Preparation—Aptamers were pooled after ligating barcodes and adapter sequences (Life Technologies) according to manufacturer protocols. In brief, equimolar pools of the aptamers were made using the following steps: Analyzed an aliquot of each library with a Bioanalyzer™ instrument and Agilent DNA 1000 Kit or Agilent High Sensitivity Kit, as appropriate for the final library concentration. The molar concentration (nmol/L) of each amplicon library was determined using the commercially available software (Agilent).

[0479] An equimolar pool of the library was prepared at the highest possible concentration.

[0480] The combined concentration of the pooled library stock was calculated.

[0481] The template dilution factor of the library pool was determined using the following equation: Template Dilution Factor=(Library pool concentration [pM])/26 pM).

[0482] Template Preparation—Using a freshly diluted library, the aptamer pool resulting from binding assays provided above were sequenced using conventional sequencing protocols. High throughput (NextGen) sequencing methods can be used as desired.

[0483] Twenty aptamers were selected based on direct or competitive assays assessing binding to EpCAM (as described above).

[0484] Affinity Measurements—These twenty aptamers were then tested for binding affinity using an in vitro binding platform. SPR can be used for this step, e.g., a Biacore SPR machine using the T200 control software, as follows:

[0485] Dilute the antigen to a concentration of 32 nM.

[0486] Prepare necessary dilutions for kinetics, starting at 32 nM prepare two-fold dilutions of antigen down to 0.5 nM.

[0487] The Biacore 200 control software is programmed with the following conditions: Solution: HBS-EP+ Buffer; Number of cycles: 3; Contact time: 120 s; Flow rate: 30 μl/min; Dissociation time: 300 s; Solution: Glycine-HCl pH 2.5; Contact time: 120 s; Flow rate: 20 μl/min; Stabilization period: 0 s. The binding affinities of these aptamers are then measured using the SPR assay above, or an alternate in vitro assay assessing the aptamer for a desired function.

[0488] FIG. 5 shows the SPR data for aptamer BTX176881 (SEQ ID NO: 3). The figure comprises an association and dissociation graph of 1:1 fitting model of the biotinylated aptamers to EpCAM protein at the indicated concentrations (nM). Table 5 shows the calculated K_{d} values from the SPR measurements that are illustrated in FIG. 5. In addition, Table 5 shows the SPR data and calculated K_{d} values for BTX187269 (SEQ ID NO: 6) and Aptamer 4 (SEQ ID NO. 1).

TABLE 5
Calculated K_{D} values from SPR measurements

| Immobilized | | Conc | | K_{d} | | |
|---|---|---|---|---|---|---|
| aptamer | Analyte | (nM) | Response | (nM) | Full R² | Full Chi² |
| BTX176881 | EpCAM | 500 | 0.2434 | 8.40 | 0.989322 | 0.179008 |
| (SEQ ID | protein | 250 | 0.136 | 8.40 | 0.989322 | 0.179008 |
| No: 3) | | 100 | 0.0776 | 8.40 | 0.989322 | 0.179008 |
| BTX187269 | EpCAM | 500 | 0.2575 | 7.12 | 0.990323 | 0.215697 |
| (SEQ ID | protein | 250 | 0.1584 | 7.12 | 0.990323 | 0.215697 |
| NO: 6) | | 100 | 0.0551 | 7.12 | 0.990323 | 0.215697 |
| Aptamer 4 | EpCAM | 500 | 0.2742 | 10.10 | 0.986276 | 0.299279 |
| (SEQ ID | protein | 250 | 0.1618 | 10.10 | 0.986276 | 0.299279 |
| NO. 1) | | 100 | 0.0809 | 10.10 | 0.986276 | 0.299279 |

*K_{d}, R² and Chi² values by Global fitting for single reference method.

### Example 4: Motif Analysis

[0489] The process of Example 3 is followed to identity a high affinity aptamer to a target of interest. Once a high affinity aptamer is identified, its sequence is then analyzed using a software program to estimate its two-dimensional folding structure. Well-known sequence alignment programs and algorithms for motif identification can be used to identify sequence motifs and reduce the dimensionality of even large data sets of sequences. Further, software programs such as Vienna and mfold are well-known to those skilled in the art of aptamer selection and can be used to further group sequences based on secondary structure motifs (shared shapes). See FIG. 3A and FIG. 3B for example structure predictions. Shared secondary structure of course, does not guarantee identical three-dimensional structure. Therefore “wet-lab” validation of aptamers is still useful as no one set of in silico tools has yet been able to fully predict the optimal aptamer among a set of aptamer candidates.

### Example 5: Microvesicle-Based Aptamer Subtraction Assay

[0490] Circulating microvesicles are isolated from normal plasma (e.g., from individuals without cancer) using one of the following methods: 1) Isolation using the ExoQuick reagent according to manufacturer's protocol; 2) Ultracentrifugation comprising spin at 50,000 to 150,000 g for 1 to 20 hours then resuspending the pellet in PBS; 3) Isolation using the TEXIS reagent from Life Technologies according to manufacturer's protocol; and 4) filtration methodology. The filtration method is described in more detail as follows:

[0491] Place syringe and filter (1.2 μm Acrodisc Syringe Filter Versapor Membrane Non-Pyrogenic Ref: 4190, Pall Life Sciences) on open 7 ml 150K MWCO column (Pierce concentrators, 150K MWCO (molecular weight cut off) 7 ml. Part number: 89922). Fill open end of syringe with 5.2 ml of filtered 1×PBS prepared in sterile molecular grade water.

[0492] Pipette patient plasma (900-1000 μl) into the PBS in the syringe, pipette mix twice

[0493] Filter the plasma into the 7 ml 150K MWCO column.

[0494] Centrifuge 7 ml 150K MWCO columns at 2000×g at 20° C. (16° C. to 24° C.) for 1 hour.

[0495] After 1 hour spin, pour the flow-through into 10% bleach to be discarded.

[0496] Visually inspect sample volume. If plasma concentrate is above the 8.5 ml graduation on the concentrator tube, continue to spin plasma sample at 10 minute increments at 2000×g at 20° C. (16° C. to 24° C.) checking volume after each spin until plasma concentrate is between 8.0 and 8.5 mls.

[0497] Pipette mix slowly on the column a minimum of 6 times and adjust pipette to determine plasma concentrate volume. If volume is between 100 μl and Target Volume, transfer plasma concentrate to previously labeled co-polymer 1.5 ml tube. If volume is still greater than Target Volume, repeat the above centrifugation step.

[0498] Pour ˜45 mls of filtered 1×PBS prepared in sterile molecular grade water into 50 ml conical tube for use in the next step.

[0499] Add the appropriate amount of filtered 1×PBS to reconstitute the sample to the Target Volume.

[0500] The microvesicles produced using any of the isolation methods will comprise a mixture of vesicle types and will be various sizes with the possible exception of ultracentrifugation methods, which may favor isolating exosome size particles.

[0501] Randomly generated oligonucleotides (produced as described in Example 1 above) are incubated with the isolated normal vesicles in PBS overnight at room temperature or at 4 degrees Celsius.

[0502] The aptamers that do not bind to these vesicles are isolated by spinning down the vesicles at 50,000 to 150,000×g for 1 to 20 hours and collecting the supernatant.

[0503] The aptamer oligonucleotides are collected from the supernatant by running the mixture over a column containing streptavidin-coated beads. These aptamers are then added to vesicles isolated from diseased patients (using the same methods as above) and incubated overnight in PBS at room temperature or 4 degrees Celsius.

[0504] The vesicles are then spun at 50,000 to 150,000×g for 1 to 20 hours and the supernatant is discarded. The vesicles are resuspended in PBS and lysed using SDS or some similar detergent.

[0505] The aptamers are then captured by running the lysis mixture over a column of streptavidin-coated beads. The isolated aptamers are then subjected to a round of PCR to amplify the products.

[0506] The process is then repeated for a set number of times, e.g., 5 times. The remaining aptamer pool has been depleted of aptamers that recognize microvesicles found in “normal” plasma. Accordingly, this method can be used to enrich the pool in aptamers that recognize cancer vesicles. See FIG. 4.

### Example 6: Detection of Microvesicles Using Anti-EpCAM Aptamers

[0507] Aptamers can be used as binding agents to detect a biomarker. In this Example, aptamers are used as binding agents to detect EpCAM protein associated with microvesicles.

[0508] FIGS. 6A-D illustrate the use of an anti-EpCAM aptamer (Aptamer 4; SEQ ID NO. 1) to detect a microvesicle population in plasma samples. Plasma samples were obtained from three men with prostate cancer and three men without prostate cancer (referred to as controls or normals). Antibodies to the following microvesicle surface protein antigens of interest were conjugated to microbeads (Luminex Corp, Austin, Tex.): FIG. 6A) EGFR (epidermal growth factor receptor); FIG. 6B) PBP (prostatic binding protein; also known as PEBP1 (phosphatidylethanolamine binding protein 1)); FIG. 6C) EpCAM (epithelial cell adhesion molecule); and FIG. 6D) KLK2 (kallikrein-related peptidase 2). Microvesicles in the plasma samples were captured using the bead-conjugated antibodies. Fluorescently labeled Aptamer 4 was used as a detector in the microbead assay. FIGS. 6A-D show the average median fluorescence values (MFI values) detected for the bead-captured and Aptamer 4 detected microvesicles. Each plot individually shows the three cancer (C1-C3) and three normal samples (N1-N3). These data show that, on average, the prostate cancer samples have higher levels of microvesicles containing the target proteins than the normals.

### Example 7: Negative and Positive Selection of Aptamers

[0509] Aptamers can be used in various biological assays, including numerous types of assays which rely on a binding agent. For example, aptamers can be used instead of antibodies in immune-based assays. This Example provides an aptamer screening method that identifies aptamers that do not bind to any surfaces (substrates, tubes, filters, beads, other antigens, etc.) throughout the assay steps and bind specifically to an antigen of interest. The assay relies on negative selection to remove aptamers that bind non-target antigen components of the final assay. The negative selection is followed by positive selection to identify aptamers that bind the desired antigen.

[0510] Preliminary experiments were done with five DNA aptamer libraries with 10¹⁵ sequences each and variable lengths (60, 65, 70, 75, 80-mers) were pre-amplified and strand separated so that forward strand (non-biotinylated) serves as an aptamer. Multiple rounds of negative selection and positive selection were performed. Before each round, the recovered aptamer products were PCR amplified and strand separated using standard methodology. Selections were performed as follows:

[0511] Negative Selection

[0512] 1. Prepare bead negative Selection Mix: Incubate 1200 non-magnetic beads with standard blocking agent for 20 min.

[0513] 2. Add 50 μl of aptamer library (5 libraries total) to a PCR strip tube with 4.5 μl of each bead mixture. Incubate for 2 h at 37° C. with agitation at 550 rpm.

[0514] 3. Pre-wet filter plate (1.2 μm, Millipore) with PBS-BN buffer. Add 150 μl PBS-BN.

[0515] 4. Transfer samples from the PCR strip tubes to the filter plate, incubate for 1 h at room temperature with agitation at 550 rpm.

[0516] 5. Collect flow-through from filter plate into a collection (NBS) plate using a vacuum manifold.

[0517] 6. Concentrate and clean samples to remove excess materials as desired.

[0518] The negative selection process is repeated up to 6-7 times.

[0519] Positive Selection

[0520] Before starting, conjugate the protein biomarkers of interest (here, SSX4, SSX2, PBP, KLK2, SPDEF) to desired non-magnetic microbeads using conditions known in the art. The recombinant purified starting material included: SPDEF recombinant protein from Novus Biologicals (Littleton, Colo., USA), catalog number H00025803-P01; KLK2 recombinant protein from Novus, catalog number H00003817-P02; SSX2 recombinant protein from Novus, catalog number H00006757-P01; PBP recombinant protein from Fitzgerald Industries International (Action, Mass., USA), catalog number 30R-1382; SSX4 recombinant protein from GenWay Biotech, Inc. (San Diego, Calif., USA), catalog number GWB-E219AC.

[0521] 1. Bead blocking: Incubate a desired number of each bead (8400×number of aptamer libraries (5)×an overage factor of (1.2)) with a starting block for 20 min.

[0522] 2. Mix 50 μl of each aptamer library sample to PCR strip tubes add 2.3 μl of bead sample with particular antigen. Incubate for 2 h at 37° C. with agitation at 550 rpm.

[0523] 3. Pre-wet filter plate (1.2 μm, Millipore) with PBS-BN buffer. Add 150 μl PBS-BN.

[0524] 4. Transfer samples from the PCR strip tubes to the filter plate, incubate for 1 h at room temperature with agitation at 550 rpm.

[0525] 5. Wash 3× with PBS-BN, add 50 μl of PBS and collect samples from the top of the filter to the 1.5 ml tubes.

[0526] The positive selection is repeated up to 16 times. Certain rounds of positive selection have additional steps to treat the recovered RNA (i.e., remaining aptamer candidates) as follows:

[0527] Round 8 of positive selection was modified as follows:

[0528] 1. After the third wash (PBS-BN) 25 μl of sample were collected from the top of the filter into 1.5 ml tubes.

[0529] 2. The filter plate was incubated at 45° C. for ˜10 min and washed immediately using vacuum. The plate was washed three more times with PBS-BN.

[0530] 3. 50 μl of PBS were added to the plate and step 2 was repeated.

[0531] 4. After the last wash, 25 μl of PBS was added to the wells. The samples were mixed well and collected from the top of the filter into 1.5 ml tubes.

[0532] Round 9 of positive selection was modified as follows:

[0533] 1. After the final wash in step 5), 5 μg/ml Streptavidin-PE was added to the aptamer mixture and incubated for 30 min at room temperature with agitation at 550 rpm.

[0534] 2. Samples on filter plate were washed 3× with PBS-BN (+ additional 500 mM NaCl).

[0535] 3. One additional wash with regular PBS-BN was performed.

[0536] 4. 50 μl of PBS was added to the samples followed by collection as above into 1.5 ml tubes.

[0537] 5. Samples stored at −20° C.

[0538] Round 14 of positive selection was modified as follows:

[0539] Before start this round, the antigens of interest (SSX4, SSX2, PBP, KLK2, SPDEF) were conjugated to carboxylated magnetic beads using methods known in the art.

[0540] 1. Bead blocking: take desired number of each non-magnetic bead (3000×number of aptamer libraries (5)×an overage factor of 1.2), add starting block (3:1, blocking per 1200 beads), make 5 mixes of 4 antigens and supplement each with different target antigen conjugated to magnetic beads (see Table 6 below, wherein the antigens are conjugated to non-magnetic beads except as indicated), incubate 20 min.

TABLE 6
Bead blocking mixtures

| Blocking | | Magnetic bead |
|---|---|---|
| Mix | Non-magnetic bead antigens | antigens |
| 1 | SSX4 + PBP + KLK2 + SPDEF | SSX2 |
| 2 | SSX2 + PBP + KLK2 + SPDEF | SSX4 |
| 3 | SSX2 + SSX4 + KLK2 + SPDEF | PBP |
| 4 | SSX2 + SSX4 + PBP + SPDEF | KLK2 |
| 5 | SSX2 + SSX4 + PBP + KLK2 | SPDEF |

[0541] 2. Add 50 μl of aptamer libraries to PCR strip tubes, add bead mixtures with target antigen on magnetic beads to the tubes with pre-selected corresponding aptamer library and incubate for 2 h at 37° C. with agitation at 550 rpm.

[0542] 3. Pre-wet filter plate with PBS-BN buffer, add 150 μl PBS-BN.

[0543] 4. Transfer samples from PCR strip tubes to filter plate, incubate 1 h room temperature with agitation at 550 rpm.

[0544] 5. After last (standard) wash, add 5 μg/ml Streptavidin-PE, incubate for 30 min room temperature with agitation at 550 rpm;

[0545] 6. Wash 3× with PBS-BN (+ additional 500 mM NaCl).

[0546] 7. Perform one additional wash with regular PBS-BN.

[0547] 8. 50 μl of PBS was added to the samples followed by collection as above into 1.5 ml tubes.

[0548] 9. Remove the magnetic beads using a magnetic stand, and replace with fresh PBS buffer.

[0549] 10. Samples stored at −20° C. for subsequent DNA extraction and strand separation.

[0550] Optional steps implemented in the later round of positive selection are intended to increase stringency of aptamer binding (e.g., increased heat or salt concentration).

### Example 8: Discovery and Characterization of Anti-EpCAM Aptamers

[0551] In this Example, an aptamer to EpCAM identified using the technique in the Example above is characterized. After selection for a pool of EpCAM binding aptamers as described above, the aptamer library was sequenced using the Ion Torrent standard protocol (Life Technologies, Carlsbad, Calif.). Lead candidates were selected as those having (a) high abundant motifs across all read sequences with full expected length product and (b) strong secondary structure (FIG. 7B).

[0552] Aptamers were selected for EPCAM protein conjugated to MicroPlex beads in competition with SSX4, SSX2, PBP, KLK2, and SPDEF recombinant proteins. A portion of the aptamers was selected in initial rounds against EpCAM that was attached to an Fc tag, and after round 8 the selection was switched to EPCAM with a Histidine tag. Another portion of the aptamers was selected in initial rounds against EpCAM that was attached to a Histidine tag, and after round 8 the selection was switched to EPCAM with an Fc tag. Methods of using Fc and histidine tags for protein purification and capture are known to those of skill in the art.

[0553] Aptamer Characterization

[0554] CAR003 is an aptamer candidate identified using the above methodology. As an RNA aptamer, CAR003 with alternate tail sequence has the following RNA sequence (SEQ ID NO. 5):

5′-auccagagug acgcagcagu cuuuucugau ggacacgugg
uggucuagua ucacuaagcc accgugucca-3′

[0555] CAR003 was further characterized. EpCAM aptamer CAR003 is modified as desired by attachment of a biotin moiety on the 5′end or 3′ end. The biotin can be used to bind the aptamer using a streptavidin-biotin system, e.g., for labeling, capture and/or anchoring. FIG. 7B illustrates the optimal secondary structure of CAR003 with a minimum free energy (ΔG) of −30.00 kcal/mol. For purposes of illustration, the aptamer is shown as an RNA aptamer (SEQ ID NO. 5) corresponding to the CAR003 DNA sequence (SEQ ID NO. 4).

[0556] Synthesis and Purification.

[0557] The selected CAR003 aptamer was re-synthesized using AKTA OligoPilot 100 Synthesizer (GE Healthcare Life Sciences Corp., Piscataway, N.J.) with a 3′Biotin and final detritylation. The product was purified with anion exchange chromatography by FPLC. Several fractions after FPLC were combined as shown as the indicated Pools 1-3 in FIG. 7C. The figure comprises an FPLC chromatogram with all product and fractions assigned in pools after checking quality on gel. FIG. 7D illustrates a SYBR GOLD stained gel with different FPLC fractions of CAR003 aptamer after synthesis. Different fractions were combined in pools based on amount of unfinished chains in order high to low (pool 1-pool 3). The pools 1-3 correspond to those indicated in FIG. 7C.

[0558] CAR003 Aptamer Characterization.

[0559] Purified CAR003 aptamer was tested for binding to recombinant EPCAM protein with a polyhistidine tag (“His tagged”) using the following internally developed assay. Anti-His tag conjugated beads were mixed with EPCAM-His tagged protein. The aptamer to be tested was labeled with streptavidin-phycoerythrin (SA-PE). The EpCAM-beads and SA-PE labeled aptamers were mixed. Binding was determined as median fluorescent value in a bead assay as described herein. MFI values (FIG. 7E-F) increase with increased binding of the SA-PE labeled aptamer to the recombinant EpCAM. FIG. 7E-F illustrate binding of CAR003 to EPCAM protein in 25 mM HEPES with PBS-BN (PBS, 1% BSA, 0.05% Azide, pH 7.4) (FIG. 7E) or in 25 mM HEPES with 1 mM MgCl₂ (FIG. 7F). EPCAM aptamer Aptamer 4 (see above) was used for comparison. As shown in the figures, CAR003 pool 3 more efficiently binds its target in the presence of MgCl₂ (FIG. 7F) than in the presence of BSA (FIG. 7E).

[0560] To understand its performance further, CAR003 binding was tested in the presence of both BSA and MgCl₂ in various buffers. FIG. 7G illustrates CAR003 binding to EpCAM in the indicated salts with and without addition of bovine serum albumin (BSA). Again, CAR003 binding to EpCAM is more efficient when BSA is not present. Additionally, 150 mM NaCl was tested but did not appear to improve CAR003 performance over MgCl₂.

[0561] Another factor which might influence performance of aptamer is denaturing with different salt compositions. FIG. 7H illustrates the effect of denaturing on CAR003 binding to EPCAM protein. As seen from the chart, denaturing of the aptamer has a positive effect on CAR003 binding to EpCAM similar as the effect on CAR003 from MgCl₂. However, denaturing in the presence of MgCl₂ may not synergistically improve binding of CAR003 to EpCAM. Interestingly, CAR003 appeared more stable compared to control Aptamer 4 in the conditions tested.

[0562] CAR003 affinity to EpCAM in the bead assay environment was assessed in the same assay as above with aptamer titrated across a constant input of antigen. FIG. 7I illustrates titration of aptamers against EPCAM recombinant protein (constant input 5 μg). Under the conditions tested, Aptamer 4 had a higher affinity to EPCAM protein compared to CAR003 as suggested from saturation level starting at 5 g of aptamer input.

[0563] In order to evaluate specificity of CAR003, it was tested using Western Blot against EPCAM recombinant protein, and controls comprising bovine serum albumin (BSA) and human serum albumin (HSA). FIG. 7J illustrates a Western blot with CAR003 aptamer versus EPCAM his-tagged protein, BSA, and HSA (5 μg each). The gel was blocked 0.5% F127 and probed with ˜50 μg/ml CAR003 biotinylated aptamer, fraction 3. The blot was visualized with NeutrAvidin-HRP followed by SuperSignal West Femto Chemiluminescent Substrate. The Western blot probed with CAR003 aptamer showed a clear preference of the aptamer to EPCAM protein over the albumins.

[0564] CAR003 test with plasma samples. Plasma samples from five prostate cancer and five normal subjects were tested with CAR003 to detect microvesicles using bead-conjugated proteins to capture the microvesicles and SA-PE labeled aptamer to detect the vesicles. SA-PE labeled Aptamer 4 detector was used as control. Fold changes of Cancer over Normal are shown in Table 7. The fold changes are shown without normalization (“Raw”) or with normalization to a negative control. The vesicles were captured with bead conjugated antibodies to SSX4, PBP, SPDEF, EPCAM, KLK2 and SSX2 as indicated.

TABLE 7
CAR003 to detect microvesicles

| | | SSX4 | PBP | SPDEF | EPCAM | KLK2 | SSX2 |
|---|---|---|---|---|---|---|---|
| Raw | Standard protocol | 0.87 | 0.39 | 0.71 | 0.63 | 0.93 | 0.87 |
| | Incubation in | 0.77 | 0.39 | 0.69 | 0.6 | 0.91 | 0.81 |
| | presence of 1 mM | | | | | | |
| | MgCl2 and absence | | | | | | |
| | of PBS-BN | | | | | | |
| | Aptamer 4 control | 0.78 | 0.67 | 0.81 | 0.72 | 1.19 | 0.79 |
| | (standard protocol) | | | | | | |
| Normalized | Standard protocol | 1.49 | 0.84 | 1.13 | 1.17 | 1.5 | 1.38 |
| to Negative | Incubation in | 1.27 | 0.83 | 1.08 | 1.1 | 1.46 | 1.29 |
| control | presence of 1 mM | | | | | | |
| | MgCl2 and absence | | | | | | |
| | of PBS-BN | | | | | | |
| | Aptamer 4 control | 1.18 | 0.96 | 1.11 | 1.04 | 1.82 | 1.1 |
| | (standard protocol) | | | | | | |

[0565] Under the conditions tested, the samples detected with CAR003 had lower MFI values as compared to detection with Aptamer 4, whereas CAR003 had a better signal-to-noise ratio and showed better separation between cancer and normal samples with SSX4, SPDEF, EPCAM and SSX2 capturing markers.

[0566] Control Aptamer

[0567] The characteristics of the aptamers (size, stability, binding affinity and specificity, etc) can be compared against control aptamers specific to EpCAM or other targets. For example, the aptamers are compared to the anti-VEGF aptamer 5′ biotin-CA ATT GGG CCC GTC CGT ATG GTG GGT (SEQ ID NO. 7) as described in Kaur and Yung, 2012.

### REFERENCES

[0568] 1) Müller, J., et al. “Selection of high affinity DNA-aptamer for activated protein C using capillary electrophoresis.” Research in Pharmaceutical Sciences 7.5 (2012): S987.
[0569] 2) Cerchia, L., and V. de Franciscis. “Nucleic Acid Aptamers Against Protein Kinases.” Current medicinal chemistry 18.27 (2011): 4152-4158.
[0570] 3) Wu, Jie, et al. “Identification, Characterization and Application of a G-Quadruplex Structured DNA Aptamer against Cancer Biomarker Protein Anterior Gradient Homolog 2.” PloS ONE 7.9 (2012): e46393
[0571] 4) Mitkevich, Olga V., et al. “DNA aptamers detecting generic amyloid epitopes.” Prion 6.4 (2012): 400-406.
[0572] 5) Kaur H, Yung L-Y L (2012) Probing High Affinity Sequences of DNA Aptamer against VEGF₁₆₅. PLoS ONE 7(2): e31196. doi: 10.1371/journal.pone.0031196.

### Example 9: Aptamer Target Identification

[0573] In this Example, aptamers conjugated to microspheres are used to assist in determining the target of two aptamers identified by library screening methods as described above. The general approach is shown in FIG. 9. The approach is used to verify the targets of CAR003, an aptamer identified by library screening to recognize EpCAM. See description above for CAR003. In this approach, the sequence of CAR003 is randomly rearranged before linkage to the microspheres. The microspheres are used as controls to bind to targets that are similar but not identical to the intended target molecule.

[0574] The protocol used is as follows:

[0575] 1) The candidate aptamers (here, CAR003) and negative control aptamers (here, randomly arranged CAR003) are synthesized with modifications to allow capture (here, the aptamers are biotinylated) and crosslinking (here, using the Sulfo-SBED Biotin Label Transfer Reagent and Kit, Catalog Number 33073 from Thermo Fisher Scientific Inc., Rockford, Ill., to allow photocrosslinking).

[0576] 2) Each of the aptamers is individually mixed with microvesicles having the target of interest (here, BrCa cell line microvesicles).

[0577] 3) After incubation to allow the aptamers to bind target, ultraviolet light is applied to the mixtures to trigger crosslinking of the aptamers with the microvesicle targets.

[0578] 4) The microvesicles are lysed, thereby releasing the crosslinked aptamer-target complex into solution.

[0579] 5) The crosslinked aptamer-target complexes are captured from solution using a streptavidin coated substrate.

[0580] 6) The crosslinked aptamer-target complexes for each aptamer are run individually on SDS-PAGE gel electrophoresis. The captured protein targets are visualized with Coomasie Blue staining.

[0581] 7) The crosslinking and binding steps may be promiscuous so that multiple bands including the intended target but also random proteins will appear on each of the gels. The intended target will be found in a band that appears on the gel with the candidate aptamer (here, CAR003) but not the related negative control aptamers (here, randomly arranged CAR003). The bands corresponding to the target are excised from the gel.

[0582] 8) Mass spectrometry (MS) is used to identify the aptamer target from the excised bands.

### Example 10: Aptamers to Breast Cancer (BrCa) Derived Microvesicles

[0583] In this Example, an aptamer library is screened to identify aptamers that distinguish between microvesicles circulating in the blood of breast cancer patients and microvesicles circulating in the blood of healthy, control individuals (i.e., without breast cancer).

[0584] Microvesicles were isolated from plasma of a pool of 60 breast cancer patients (BrCa+). Microvesicles were also isolated from pool of 60 non-cancer samples (BrCa−). Microvesicles were isolated from the plasma using ultracentrifugation (120,000×g). Microvesicles were in the pellet from the ultracentrifugation. The supernatant from the ultracentrifugation was saved to use as a control. The microvesicles from both sample types were conjugated to MagPlex beads (Luminex Corp, Austin Tex.). Optionally, the isolated microvesicles are incubated with anti-HSA/IgG/Fibrinogen beads to remove these highly abundant blood proteins. However, the conjugation step can be optimized to favor conjugation of the microvesicles such that removal of highly abundant proteins may be less of an issue.

[0585] The aptamer library used consisted of a 2′F SUL1 RNA aptamer library. The sequence is 5′-GGGAGGACGAUGCGG-N40-CAGACGACUCGCUGAGGAUCCGAGA-3′ (SEQ ID NO. 8). The aptamer library consists of three sections: Forward primer—15 nucleotides, variable region—40 nucleotides; reverse primer—25 nucleotides. All pyrimidines (C and U) were 2′Fluoro modified.

[0586] The aptamer library was incubated with either the cancer or control microvesicle-conjugated beads. Thirteen rounds of positive selection for aptamers that bind the microvesicles were performed in parallel for both types of samples. See Example 11 below for detailed protocol of the positive selection steps. Negative selection was not performed.

[0587] A number of representative sequences obtained from these procedures are shown in Table 8. The sequences in the table were identified in the aptamer pools from selection against BrCa microvesicles but were not in the aptamer pools selected against non-cancer samples. In Table 8, the sequences are shown 5′ to 3′ from left to right, wherein each complete sequence consists of a 5′ leader sequence 5′-GGGAGGACGAUGCGG (SEQ ID NO. 9) followed by the indicated Variable Sequence followed by the 3′ tail sequence 5′-CAGACGACUCGCUGAGGAUCCGAGA (SEQ ID NO. 10). Each sequence is derived from a library having a leader and tail (see description above) with a variable sequence between. It is understood that the nucleotide sequences that are disclosed in Table 8 can also be modified to the extent that resulting modifications result in an aptamer having about 50, 55, 60, 65, 70, 75, 80, 85, 90, 95, 96, 97, 98, and 99 percent homology to the disclosed sequence and retain the functionality of binding to microvesicle antigens or functional fragments thereof.

TABLE 8
BrCa microvesicle aptamer candidate sequences

| | SEQ | |
|---|---|---|
| | ID | |
| ID | NO. | Variable Sequence |
| B RCA_APT1_ | 11 | CGCGUCUUCCCCGCAUUGCCGCAAUUGCCAUACAUUAAUA |
| RNA | | |
| BRCA_APT2_ | 13 | GUCCGGAACGCCUCGAUCCUCGCAUAAUAUGAUACGUCUG |
| RNA | | |
| BRCA_APT3_ | 15 | GUCCAUGGUACGCCUCGAUUCCGCCCAUACAUGCAUGUAA |
| RNA | | |
| BRCA_APT4_ | 17 | CACUAUCCGUUUGUCCGUCCUCUUGUGGUAUUGCGCAUGC |
| RNA | | |
| BRCA_APT5_ | 19 | UCUUCCAUCUGGUCGCGAUACAGAAUACGAUUAACAUAAA |
| RNA | | |
| BRCA_APT6_ | 21 | GAUCACGCUGCCCUUUGUUUAAGGCCUUUAUACAAACGCA |
| RNA | | |
| BRCA_APT7_ | 23 | UAUUCGCCAGUCACAUCAACUAUGAUGACGCUUGACUGGA |
| RNA | | |

[0588] Each sequence in Table 8 is synthesized in two variants for further investigation: 5′ biotinylated and 3′ biotinylated. This provides aptamer variants that can be captured at the 5′ end or the 3′ end as desired. The aptamers are further synthesized with each pyrimidine (C and U) 2′Fluoro modified.

[0589] The DNA sequence corresponding to each RNA sequence in Table 8 is provided in the sequence listing, where the DNA sequence directly follows its corresponding RNA sequence. For example SEQ ID NO. 12 is the DNA sequence corresponding to RNA sequence SEQ ID NO. 11, etc. The DNA forms of the aptamers are synthesized for further characterization as well.

[0590] The aptamers above were identified using positive selection for aptamers which recognize BrCa and non-BrCa microvesicles conjugated to microspheres.

### Example 11: Aptamer Library Selection Protocol

[0591] This Example provides the protocol for SUL1 RNA library selection performed in the Example above. The protocol can be followed for other aptamer libraries and sample input as desired.

[0592] Preparation

[0593] The working space is cleaned with 80% EtOH before working.

[0594] Beads are MagPlex beads (Luminex Corp., Austin, Tex.). Other beads can be substituted as desired.

[0595] Buffers/Reagents to Prepare:
[0596] MilliQ water
[0597] 100 mM MgCl₂
[0598] 5× Transcription Buffer (200 mM Tris pH 7.9)
[0599] 1×PBS
[0600] 1×PBS with 3 mM MgCl₂
[0601] 10×PBS
[0602] Selection buffer (1×PBS with 0.1% BSA and 3 mM MgCl₂)

[0603] Before starting with selection, remove the bead storage buffer, and wash beads with 1×PBS w/3 mM MgCl₂ 1 times (200 uL total in all 4 tubes). 200,000 beads per selection are used.

[0604] Binding 2′F SUL1 RNA Pool to Microvesicle Coated Magnetic Beads

[0605] Abbreviations: TK—Transcription; NTC—No template control.

[0606] Steps:
[0607] 1. 1^{st} Round: Mix 1 nmol purified 2′F SUL1 RNA with 20 μl of resuspended beads (conjugated with microvesicle). 10 uL of 10×PBS+1% BSA, 3 μl 100 mM MgCl₂, and 47 uL H₂O. This gives a final concentration of 1×PBS, 0.1% BSA, 3 mM MgCl₂.
   [0608] 1.1 The addition of MgCl₂ in this step gives a concentration of 3 mM MgCl₂. This is the binding concentration for the entire process.
   [0609] 1.2 Following Rounds: Mix 20 μl of transcription product (15 mM MgCl₂ inside) with 20 μl of washed microvesicle coated beads, plus 9 uL 10×PBS with 1% BSA, 51 uL H₂O. No additional MgCl₂ is needed because the MgCl₂ in the diluted transcription product (TK) provides a final concentration of 3 mM MgCl₂.
[0610] 2. Incubate for 30 min at 37° C., shake at 1000 rpm, and pipet mix every 10 minutes.
[0611] 3. Wash the beads:
   [0612] 3.1 One washing cycle comprises:
      [0613] 3.1.1 Remove the beads from the magnet
      [0614] 3.1.2 Resuspend beads in 100 μl 1×PBS+3 mM MgCl₂ off the magnet.
      [0615] 3.1.3 Incubate sample for 30 seconds off of the magnet.
      [0616] 3.1.4 Place the sample back onto the magnet, and wait until the beads are on the side.
      [0617] 3.1.5 Remove and discard the supernatant.
      [0618] 3.1.6 Resuspend in 100 μl 1×PBS+3 mM MgCl₂+0.1% BSA off of the magnet.
      [0619] 3.1.7 Incubate sample for 3 minutes off of the magnet.
      [0620] 3.1.8 Place the sample back onto the magnet, and wait until the beads are on the side.
      [0621] 3.1.9 Remove and discard the supernatant
   [0622] 3.2 1^{st} Round: Place bead mixture on a magnet and remove the supernatant. Wash once with 100 μl 1×PBS+3 mM MgCl₂+0.1% BSA (by pipette mixing the beads), and discard buffer.
   [0623] 3.3 Following Rounds: Increase the washing steps every second round by one more washing step up to 3 washing steps.
[0624] 4. Add 55 μl MilliQ water to the bead sample.
[0625] 5. Elute the RNA by incubating the bead sample for 5 min at 80° C.
   [0626] 5.1 Check if there is 50 μl, if not spin the sample down to spin down the condensed water off the top.
   [0627] 5.2 Transfer the supernatant to a new vial. Work quickly to avoid the strands rebinding the beads.
      [0628] 5.2.1 Use 50 μl eluate for the following RT-PCR and store the rest at −20° C.

[0629] RT-PCR of Recovered Aptamer Candidates

[0630] Tips
[0631] The rest of the RT-PCR sample and the TK-PCR sample is stored at −20° C.
[0632] RNA can be stored at 4° C. for ˜1 h
[0633] RT-PCR product can be stored overnight at 4° C.
[0634] Proceed to the next selection cycle for optimal RNA quality immediately after transcription.
[0635] Avoid vortexing RNA
[0636] Mix on ice
[0637] Use 0.5 ml PCR tubes
[0638] Every RT-PCR should have a no-template control (NTC) with water instead of template
[0639] Do not freeze-thaw DTT more than one time
[0640] 6. Prepare a Master Mix before the first round per Table 9, check it with 0.5 pmol RNA and store aliquots of 48 μl at −20° C. until usage.

TABLE 9
RT-PCR master mix

| | Volume (μl)/ | Final | |
|---|---|---|---|
| Reagent | reaction | concentration | |
| 5x Colorless GoTaq Flexi | 20 | 1x | |
| Buffer Promega cat# M890A | | | |
| 5 x first strand buffer | 4 | 0.2x | |
| (Invitrogen) lot# 1300427 | | | |
| 100 mM DTT | 2 | 2 | mM |
| 100 μM SUL1 F primer | 1 | 1 | μM |
| 100 μM SUL1 R primer | 1 | 1 | μM |
| 100 mM MgCl₂ | 1.5 | 1.5 | mM |
| 25 mM (each) dNTPs | 1.2 | 300 | μM |
| MilliQ water | 17.3 | | |
| Total | 48 | | |

[0641] 7. Add 50 μl MilliQ water as negative control (NTC) (pipette this first) or 50 μl selection eluate. Pipet mix.
[0642] 8. Incubate at 65° C. for 5 min.
[0643] 9. After cooling to 4° C., add:
   [0644] 9.1 1 μl Superscript II Reverse Transcriptase (Invitrogen, cat#18064) (200 U/μl)
   [0645] 9.2 1 μl GoTaqFlexi DNA polymerase (5 units/μl) Promega cat# M8305.

### PCR-Program (SARTPCR)

[0646] a) 10 min 54° C.
   [0647] (This step is only for reverse transcriptase, should more rounds be needed, do not repeat step A.)
[0648] b) 1 min 95° C.
[0649] c) 1 min 60° C.
[0650] d) 1 min 72° C.
[0651] 10. Cycle steps b-d for
   [0652] 10.1 1^{st} round b-d 4 cycles. Run 5 μL PCR products on a 4% agarose gel.
      [0653] 10.1.1 Subsequent rounds: The amount of RNA is decreased after the first round, leading to an increase in required PCR-cycles. To determine the number of cycles needed each time, check the band intensity from the agarose gel from the previous round of selection. Use that number of cycles to start the next round of RT-PCR. Note: Always check results on an agarose gel.
         [0654] 10.1.1.1 Agarose gel results: product band should be seen at the target length. The band intensity should be about the same as the 50 bp ladder band (if not a little less intense). If the band is not intense enough (barely visible), cycle an appropriate amount more and re-check on an agarose gel.

[0655] Transcription

[0656] All mixing performed on ice. Prepare transcription Master Mix per Table 10 and store aliquots of 85.7 μl at −20° C. until use.
[0657] 11. Verify pH of stock 200 mM Tris pH 7.9 before use. A change in pH over time may cause problems with the transcription.

TABLE 10
Transcription (TK) Master Mix for SUL1 library

| | Volume (μl) for | Volume (μl) for | Final |
|---|---|---|---|
| Reagent | one reaction | 20 reactions | concentration |
| 5x Transcription buffer | 20 | 400 | 1x |
| (200 mMTris, pH 7.9) | | | |
| 100 mM DTT | 5 | 100 | 5 mM |
| 100 mM ATP | 1 | 20 | 1 mM |
| 100 mM GTP | 1 | 20 | 1 mM |
| 100 mM 2′F-dUTP | 3 | 60 | 3 mM |
| 100 mM 2′F-dCTP | 3 | 60 | 3 mM |
| 100 mM MgCl₂ | 15 | 300 | 15 mM |
| MilliQ water | 37 | 740 | |
| Total volume | 85 | 1700 μl | |

[0658] 12. Add 10 μl RT-PCR product to the mastermix.
[0659] 13. Add 1 μl RNasin (40 units/μl)
   [0660] 13.1 Promega Recombinant RNasin Ribonuclease Inhibitor cat# N2515/N2511
[0661] 14. Add 4 μl T7 Y639F mutant polymerase (25 U/μl use: 100 U total per reaction)
[0662] 15. Perform the reaction for 30 min at 37° C.
[0663] 16. Use the transcription-product directly for the next selection round. If the next step is not feasible, freeze transcription product at −20 C.

[0664] Subsequent Rounds

[0665] Repeat the bead incubation, the RT-PCR and transcription as often as needed. Try to have similar band intensity of the RT-PCR product for the sample in all rounds as noted above.

[0666] Binding Assay

[0667] A binding assay is performed after desired rounds of selection to determine to assess non-specific binding of cancer selected aptamers to control beads (conjugated to supernatant from plasma ultracentrifugation, see above) and likewise for non-cancer control samples. Binding assays can also be performed to assess binding of selected aptamers against the intended target microvesicles.

[0668] Cherenkov protocol: Performed using ³²P radioactively labeled aptamer library.

[0669] Final concentration of selection buffer: 1×PBS+3 mM MgCl₂+0.01% BSA pH 7.4

[0670] Wash buffer: 1×PBS+3 mM MgCl₂ pH 7.4
[0671] 1. Remove microvesicle samples from −80° C. freezer and thaw.
[0672] 2. Place beads on magnet (200,000 per sample experiment), remove bead storage buffer.
[0673] 3. Wash 1×200 μL for 1 minute each with 1×PBS, 3 mM MgCl₂ buffer. Pool beads to make 200,000 in one tube.
[0674] 4. Resuspend beads in 70 μL of the selection buffer. (10 μl of 10×PBS, 1% BSA+3 μL 100 mM MgCl₂+57 μL H₂O per sample).
[0675] 5. Add 30 μL radioactively labeled RNA aptamer library to their respective sample.
[0676] 6. Incubate shaking at 1000 rpm at 37° C. for 30 min.
[0677] 7. Place samples on a magnet.
[0678] 8. Remove and save supernatant.
[0679] 9. Wash beads with 200 μL wash buffer 1×PBS 3 mM MgCl₂ pH 7.4, incubating off the magnet for 3 minute.
[0680] 10. Place samples on the magnet, remove and save wash solution.
[0681] 11. Repeat steps 9, 10.
[0682] 12. Add 100 μL water to the sample, pipette mix.
[0683] 13. Heat at 80° C. for 5 minutes.
[0684] 14. Place samples on a magnet, remove supernatant, and save.
[0685] 15. Resuspend beads in 100 μL water.
[0686] 16. Measure radioactivity of every fraction using scintillation counter.
[0687] 17. Analyze amount of background binding present.

[0688] Negative Selection

[0689] As desired, a negative selection step is added prior to incubating the aptamer library with the beads conjugated to the target microvesicles (i.e., procedure “Binding 2′F SUL1 RNA pool to microvesicle coated magnetic beads” above). The negative selection can be performed using beads conjugated to the supernatant or the input samples (e.g., plasma) after microvesicles are filtered or sedimented from the sample (referred to as “no microvesicle coated beads,” “microvesicle depleted samples,” or similar). The steps are:

[0690] 1) Start with aptamer library product from the desired round after transcription as described above. Wash the beads before start: remove storage buffer, wash beads with 200 μL wash buffer, then replace buffer as stated below:

[0691] 2) Negative selection step: Add and pipet mix 20 μl of transcription product (15 mM MgCl₂) with freshly washed ‘no microvesicle’ coated beads with 10 μL 10×PBS with 1% BSA, 70 μL H₂O. No additional MgCl₂ is needed because the MgCl₂ in the diluted transcription product (TK) provides a final concentration of 3 mM MgCl₂.

[0692] 3) Incubate for 30 min at 37° C., shake at 1000 rpm.

[0693] 4) Remove supernatant and add it to the positive selection beads (directly), which are washed microvesicle coated beads.

[0694] Continue with positive selection incubation. See Binding 2′F SUL1 RNA pool to microvesicle coated magnetic beads above, starting at step 2. Additional steps through transcription are as detailed above.

### Example 12: Additional Aptamers to Breast Cancer (BrCa) Derived Microvesicles

[0695] In this Example, an aptamer library is screened to identify aptamers that distinguish between microvesicles circulating in the blood of breast cancer patients and microvesicles circulating in the blood of healthy, control individuals (i.e., without breast cancer). The procedure used the same samples and aptamer library as in Example 10 above. The procedure in this Example differs in that negative selection was performed before each positive selection starting after the third round of positive selection.

[0696] Negative selection serves to remove aptamers that bind soluble/abundant/non-informative and common proteins for cancer and non-cancer proteins. Negative selection include performing negative selection on the aptamer candidates selected against BrCa+ microvesicles as follows: (i) using microbeads conjugated to the supernatant from the BrCa+ plasma ultracentrifugation step (which should not contain microvesicles); (ii) using microbeads conjugated to the supernatant from the BrCa− plasma ultracentrifugation step (which should not contain microvesicles); (iii) using microbeads conjugated to BrCa− microvesicles. Negative selection can also be performed on the aptamer candidates selected against BrCa− microvesicles as follows: (i) using microbeads conjugated to the supernatant from the BrCa+ plasma ultracentrifugation step (which should not contain microvesicles); (ii) using microbeads conjugated to the supernatant from the BrCa− plasma ultracentrifugation step (which should not contain microvesicles); (iii) using microbeads conjugated to BrCa+ microvesicles. Negative selection rounds are performed between rounds of positive selection as described herein.

[0697] Microvesicles were isolated from plasma of a pool of 60 breast cancer patients (BrCa+). Microvesicles were also isolated from pool of 60 non-cancer samples (BrCa−). Microvesicles were isolated from the plasma using ultracentrifugation (120,000×g). Microvesicles were in the pellet from the ultracentrifugation. The supernatant from the ultracentrifugation was saved to use as a control. The microvesicles from both sample types were conjugated to MagPlex beads (Luminex Corp, Austin Tex.).

[0698] The aptamer library used consisted of a 2′F SUL1 RNA aptamer library. The sequence is 5′-GGGAGGACGAUGCGG-N40-CAGACGACUCGCUGAGGAUCCGAGA-3′ (SEQ ID NO. 8). The aptamer library consists of three sections: Forward primer—15 nucleotides, variable region—40 nucleotides; reverse primer—25 nucleotides. All pyrimidines (C and U) were 2′Fluoro modified.

[0699] The aptamer library was incubated with either the cancer or control microvesicle-conjugated beads. Nine rounds of positive selection for aptamers that bind the microvesicles were performed in parallel for both types of samples. Negative selection against beads conjugated to the input plasma supernatant after ultracentrifugation before positive selection in rounds 4-9. See Example 11 above for detailed protocol of the positive selection and negative selection steps.

[0700] The aptamers that were retained from the above positive selection were sequenced using Next Generation sequencing technology consisting of Ion Torrent NGS (Life Technologies, Inc., Carlsbad, Calif.). The MiSeq system may be used also (Illumina, Inc., San Diego, Calif.). The sequences are compared to identify aptamers that are found in the cancer samples and not the control samples, and vice versa. Such aptamers provide candidates that can be used to distinguish between BrCa and non-BrCa samples.

[0701] The sequencing data was analyzed according to the following procedure:

[0702] Step 1: Sequences were ranked according to frequencies in entire aptamer pool recovered in round 9 after negative selection against beads conjugated to microvesicle-depleted cancer plasma followed by positive selection against beads conjugated to cancer microvesicles.

[0703] Step 2: Fold changes were calculated between noted sample in Step 1 and: (i) same sample after additional negative selection against microvesicle depleted cancer plasma; (ii) same sample after additional negative selection against non-cancer microvesicles; (iii) same sample after additional negative selection against microvesicles depleted non-cancer plasma.

[0704] Step 3: Sequences were ranked based on fold changes calculated in Step 2 to identify sequences which are abundant or deficient in aptamer pool selected for breast cancer derived microvesicles.

[0705] Step 4: Possible mutant sequences (e.g., due to PCR or other errors) were removed based on results of consolidation analysis.

[0706] Step 5: Sequences were identified with fold changes greater than 3 and minimum frequency 50 in all three variants (i, ii and iii in step 2).

[0707] The same selection schemes as in steps 1-5 were performed for aptamers selected against beads conjugated to non-cancer microvesicles.

[0708] A number of representative sequences obtained from these procedures are shown in Table 11. The sequences in the table were identified in the aptamer pools from selection against BrCa microvesicles but were not in the aptamer pools selected against non-cancer samples. In Table 11, the sequences are shown 5′ to 3′ from left to right, wherein each complete sequence consists of a 5′ leader sequence 5′-GGGAGGACGAUGCGG (SEQ ID NO. 9) followed by the indicated Variable Sequence followed by the 3′ tail sequence 5′-CAGACGACUCGCUGAGGAUCCGAGA (SEQ ID NO. 10). Each sequence is derived from a library having a leader and tail (see description above) with a variable sequence between. It is understood that the nucleotide sequences that are disclosed in Table 11 can also be modified to the extent that resulting modifications result in an aptamer having about 50, 55, 60, 65, 70, 75, 80, 85, 90, 95, 96, 97, 98, and 99 percent homology to the disclosed sequence and retain the functionality of binding to microvesicle antigens or functional fragments thereof.

TABLE 11
BrCa microvesicle aptamer candidate sequences

| ID | SEQ ID | |
|---|---|---|
| (Figure) | NO. | Variable Sequence |
| BCE8 | 25 | UACCGCCUCAUCAUCGGACACGACGUGUAUCAGUUGGCUG |
| (FIG. 10Ai) | | |
| BCE9 | 26 | GUUCUCGCCUCUGUCCUCAUGGUUCGAACCGGUAUGCAUG |
| (FIG. 10Aii) | | |
| BCE10 | 27 | GCGGUUUCUUCUCCUGACUACAUGAGAUUAAUAAACGCGC |
| (FIG. 10Aiii) | | |
| BCE11 | 28 | CCGCCUCGAACACUGACGUCGUGGAACCUUCGAUUGCUAG |
| (FIG. 10Aiv) | | |
| BCE12 | 29 | AAUCACAGUAAUUCUGCCCCUCUGAUGAAACCGGUUACUU |
| (FIG. 10Av) | | |
| BCE13 | 30 | CUUAGUGAUUUCGCCGCCCCUCUGUUUAGUGGCCAUUGGA |
| (FIG. 10Avi) | | |
| BCE14 | 31 | ACACUAUUCCGGUAAGUCAUCGUUUAACCGUUUGUUGCAA |
| (FIG. 10Avii) | | |
| BCE15 | 32 | UGCGCAACGCCUUGAUUCACUCCUACAGUGUGUCUAUAGA |
| (FIG. 10Aviii) | | |
| BCE16 | 33 | AAUGUUAAGCUUACAUACGCCUGGGUCACUCUUUGUUCUG |
| (FIG. 10Aix) | | |
| BCE17 | 34 | GUAAAUAUUCACGUUGAAUCGCCUUGCUCCUCUUAGUCUG |
| (FIG. 10Bi) | | |
| BCE18 | 35 | CCGCCUCGGAUCGUUCCCAAUGGUGGUACCCCUAUUAAUG |
| (FIG. 10Bii) | | |
| BCE19 | 36 | UGUAGAUCGUUCUUAUCCGCCUCGGUCUUCCCCAGGUUAA |
| (FIG. 10Biii) | | |
| BCE20 | 37 | AUCGUCGGGCCCCUUUUAUGAAACUUACAUGAAAGCGCAC |
| (FIG. 10Biv) | | |
| BCE21 | 38 | UAAGAGUGCACAGUACUGCCUCGAUCCUCCAUGGCUUAAG |
| (FIG. 10Bv) | | |
| BCE22 | 39 | GAAUUAGUACUGACGGCCGCCUUGAUCCUCCGUUAGUCUG |
| (FIG. 10Bvi) | | |
| BCE23 | 40 | GCCCGCCUCCGAAGCCCUCCUAAGUGCACUUUAAACCGCG |
| (FIG. 10Bvii) | | |
| BCE24 | 41 | CCGCCUGGGAUCACUCUCUACGCGUAUAAAUGCUCUGUCA |
| (FIG. 10Bviii) | | |
| BCE25 | 42 | AGUCUGACCCUGUUAUGGACUACCAUAUCAGAAAGGUACU |
| (FIG. 10Bix) | | |
| BCE26 | 43 | GGUGAUCCUCCCCCCCGCCUCGAAGAUUUGUGCACAUAUC |
| (FIG. 10Ci) | | |
| BCE27 | 44 | GCUACCAUCGUCUAGUGAGUCACCCUUAGUUCAUCAAGGC |
| (FIG. 10Cii) | | |

[0709] Each sequence in Table 11 is synthesized in two variants for further investigation: 5′ biotinylated and 3′ biotinylated. This provides aptamer variants that can be captured at the 5′ end or the 3′ end as desired. The aptamers are further synthesized with each pyrimidine (C and U) 2′Fluoro modified. The aptamers may also be synthesized as the DNA sequence corresponding to each RNA sequence in Table 11. The aptamer libraries can also be filtered based on predicted secondary sequence, free energy, and other parameters as described herein.

[0710] FIGS. 10A-C show binding of the aptamers in Table 11 against microbeads conjugated to various input samples. The aptamer is indicated above each plot and the plot for each aptamer is indicated in the ID column in Table 11. The input sample is indicated on the X axis from left to right as follows: 1) Cancer Exosome: aptamer binding to microbeads conjugated to microvesicles isolated from plasma samples from breast cancer patients; 2) Cancer Non-exosome: aptamer binding to microbeads conjugated to plasma samples from breast cancer patients after removal of microvesicles by ultracentrifugation; 3) Non-Cancer Exosome: aptamer binding to microbeads conjugated to microvesicles isolated from plasma samples from normal (i.e., non-breast cancer) patients; 4) Non-Cancer Non-Exosome: aptamer binding to microbeads conjugated to plasma samples from breast cancer patients after removal of microvesicles by ultracentrifugation. As shown in FIGS. 10A-C, the aptamers were each able to distinguish between the cancer microvesicle samples versus the supernatant control samples and the non-cancer microvesicles. Further, all sequences in Table 11 were observed as binding more abundantly to cancer derived microvesicles as compared to non-cancer derived microvesicles with the exception of BCE10 and BCE14, which were observed as binding more abundantly to non-cancer derived microvesicles as compared to cancer derived microvesicles.

[0711] Based on the comparisons performed in this Example, aptamers that bind different starting input are obtained, including: 1) aptamers that preferentially bind cancer-derived microvesicles over non-cancer derived microvesicles; 2) aptamers that preferentially bind non-cancer-derived microvesicles over cancer derived microvesicles; 3) aptamers that bind both non-cancer-derived microvesicles and cancer derived microvesicles (e.g., “universal” binders); and 4) aptamers that bind plasma components that have been depleted of microvesicles.

[0712] The aptamer libraries in this Example are further subjected to four rounds of additional negative and positive selection. The positive selection is performed as described in this Example. The negative selection rounds are performed using the beads conjugated to non-cancer microvesicles as negative selection for aptamers obtained by positive selection against beads conjugated to cancer microvesicles. Similarly, the negative selection rounds are performed using the beads conjugated to cancer microvesicles as negative selection for aptamers obtained by positive selection against beads conjugated to non-cancer microvesicles.

### Example 13: Disease Diagnosis

[0713] This example illustrates the use of oligonucleotide probes of the present invention to diagnose a proliferative disease.

[0714] A suitable quantity of an oligonucleotide or pool of oligonucleotides that bind a BrCa-derived population of microvesicles, such as identified in Example 10 or Example 12 or various Examples below, is synthesized via chemical means known in the art. The oligonucleotides are conjugated to a diagnostic agent suitable for detection, such as a fluorescent moiety, using a conjugation method known in the art.

[0715] The composition is applied to microvesicles isolated from blood samples taken from a test cohort of patients suffering from a proliferative disease associated with the overexpression of microvesicles, e.g. breast cancer. The composition is likewise applied to microvesicles isolated from blood samples taken from a negative control cohort, not suffering from a proliferative disease.

[0716] The use of appropriate detection techniques (e.g., microbead assay or flow cytometry) on the test cohort samples indicates the presence of disease, while the same techniques applied to the control cohort samples indicate the absence of disease.

[0717] The results show that the oligonucleotides of the present invention are useful in diagnosing proliferative diseases.

### Example 14: Theranostics

[0718] This example illustrates the use of oligonucleotide probes of the present invention to provide a theranosis for a drug for treating a proliferative disease.

[0719] A suitable quantity of an oligonucleotide or pool of oligonucleotides that bind a BrCa-derived population of microvesicles, such as identified in Example 10 or Example 12 or various Examples below, is synthesized via chemical means known in the art. The probes are conjugated to an agent suitable for detection, such as a fluorescent moiety, using a method known in the art such as conjugation. The oligonucleotide probe or panel of oligonucleotide probes are within a suitable composition, such as a buffered solution.

[0720] Treatment Selection.

[0721] The composition is applied to microvesicles isolated from blood samples taken from a test cohort of patients suffering from a proliferative disease, e.g. breast cancer, that responded to a certain treatment, e.g., trautuzamab. The composition is likewise applied to microvesicles isolated from blood samples taken from a control cohort consisting of patients suffering from the same proliferative disease that did not respond to the treatment. The use of appropriate detection techniques (e.g., microbead assay or flow cytometry) on the test cohort samples indicates that probes which bind the samples are useful for identifying patients that will respond to the treatment, while the same techniques applied to the control cohort samples identifies probes useful for identifying patients that will not respond to the treatment.

[0722] Treatment Monitoring.

[0723] In another setting, the composition is applied to microvesicles isolated from blood samples taken from a test cohort of patients suffering from a proliferative disease, e.g. breast cancer, prior to or during a course of treatment, such as surgery, radiotherapy and/or chemotherapy. The composition is then applied to microvesicles isolated from blood samples taken from the patients over a time course. The use of appropriate detection techniques (e.g., microbead assay or flow cytometry) on the test cohort samples indicates whether the detected population of disease-related microvesicles increases, decreases, or remains steady in concentration over time during the course of treatment. An increase in the population of disease-related microvesicles post-treatment may indicate that the treatment is ineffective whereas a decrease in the population of disease-related microvesicles post-treatment may indicate that the treatment has a beneficial effect.

[0724] The results show that the oligonucleotide probes of the present invention are useful in theranosing proliferative diseases.

### Example 15: Therapeutic Oligonucleotide Probes

[0725] This example illustrates the use of oligonucleotide probes of the present invention to treat a proliferative disease.

[0726] A suitable quantity of an oligonucleotide or pool of oligonucleotides that bind a BrCa-derived population of microvesicles, such as identified in Example 10 or Example 12 or various Examples below, is synthesized via chemical means known in the art. The oligonucleotides are conjugated to a chemotherapeutic agent, such as Doxil, using a conjugation method known in the art. The conjugate is formulated in an aqueous composition.

[0727] The composition is administered intravenously, in one or more doses, to a test cohort of mice suffering from a proliferative disease associated with the overexpression of the microvesicles, e.g. a breast cancer model. A control cohort, not suffering from a proliferative disease is administered the identical composition intravenously, according to a corresponding dosage regimen.

[0728] Pathological analysis of tumor samples and/or mouse survival indicates that mortality and/or morbidity are improved in the test cohort over the control cohort.

[0729] The results show that the oligonucleotides of the present invention are useful in treating proliferative diseases.

[0730] Useful oligonucleotides can be used to treat proliferative diseases in other organisms, e.g., a human.

### Example 16: Oligonucleotide—Sequencing Detection Method

[0731] This example illustrates the use of an oligonucleotide pool to detect microvesicles that are indicative of a phenotype of interest. The method makes use of a pool of oligonucleotides that have been enriched against a target of interest that is indicative of a phenotype of interest. The method in this Example allows efficient use of a library of oligonucleotides to preferentially recognize a target entity.

[0732] For purposes of illustration, the method is described in the Example with a microvesicle target from a bodily fluid sample. One of skill will appreciate that the method can be extended to other types of target entity (e.g., cells, proteins, various other biological complexes), sample (e.g., tissue, cell culture, biopsy, other bodily fluids) and other phenotypes (other cancers, other diseases, etc) by enriching an aptamer library against the desired input samples.

[0733] General Workflow:

[0734] 1) Obtain sample (plasma, serum, urine or any other biological sample) of patients with unknown medical etymology and pre-treating them accordingly to ensure availability of the target of interest (see below). Where the target of interest is a microvesicle population, the microvesicles can be isolated and optionally tethered to a solid support such as a microbead.

[0735] 2) Expose pre-treated sample to an oligonucleotide pool carrying certain specificity against target of interest. As described herein, an oligonucleotide pool carrying certain specificity against the target of interest can be enriched using various selection schemes, e.g., using non-cancer microvesicles for negative selection and cancer microvesicles for positive selection as described above. DNA or RNA oligonucleotides can be used as desired.

[0736] 3) Contact oligonucleotide library with the sample.

[0737] 4) Elute any oligonucleotides bound to the target.

[0738] 5) Sequence the eluted oligonucleotides. Next generation sequencing methods can be used.

[0739] 6) Analyze oligonucleotide profile from the sequencing. A profile of oligonucleotides known to bind the target of interest indicates the presence of the target within the input sample. The profile can be used to characterize the sample, e.g., as cancer or non-cancer.

[0740] Protocol Variations:

[0741] Various configurations of the assay can be performed. Four exemplary protocols are presented for the purposes of the oligonucleotide-sequencing assay. Samples can be any appropriate biological sample. The protocols can be modified as desired. For example, the microvesicles can be isolated using alternate techniques instead or in addition to ultracentrifugation. Such techniques can be disclosed herein, e.g., polymer precipitation (e.g., PEG), column chromatography, and/or affinity isolation.

[0742] Protocol 1:

[0743] Ultracentrifugation of 1-5 ml bodily fluid samples (e.g., plasma/serum/urine) (120K×g, no sucrose) with two washes of the precipitate to isolate microvesicles.

[0744] Measure total protein concentration of recovered sample containing the isolated microvesicles.

[0745] Conjugate the isolated microvesicles to magnetic beads (for example MagPlex beads (Luminex Corp. Austin Tex.)).

[0746] Incubate conjugated microvesicles with oligonucleotide pool of interest.

[0747] Wash unbound oligonucleotides by retaining beads using magnet.

[0748] Elute oligonucleotides bound to the microvesicles.

[0749] Amplify and purify the eluted oligonucleotides.

[0750] Oligonucleotide sequencing (for example, Next generation methods; Ion Torrent: fusion PCR, emulsion PCR, sequencing).

[0751] Assess oligonucleotide profile.

[0752] Protocol 2:

[0753] This alternate protocol does not include a microvesicle isolation step, microvesicles conjugation to the beads, or separate partitioning step. This may present non-specific binding of the oligonucleotides against the input sample.

[0754] Remove cells/debris from bodily fluid sample and dilute sample with PBS containing MgCl₂ (2 mM).

[0755] Pre-mix sample prepared above with oligonucleotide library.

[0756] Ultracentrifugation of oligonucleotide/sample mixture (120K×g, no sucrose). Wash precipitated microvesicles.

[0757] Recover precipitate and elute oligonucleotides bound to microvesicles.

[0758] Amplify and purify the eluted oligonucleotides.

[0759] Oligonucleotide sequencing (for example, Next generation methods; Ion Torrent: fusion PCR, emulsion PCR, sequencing).

[0760] Assess oligonucleotide profile.

[0761] Protocol 3:

[0762] This protocol uses filtration instead of ultracentrifugation and should require less time and sample volume.

[0763] Remove cells/debris from bodily fluid sample and dilute it with PBS containing MgCl₂ (2 mM).

[0764] Pre-mix sample prepared above with oligonucleotide library.

[0765] Load sample into filter (i.e., 150K or 300K MWCO filter or any other that can eliminate unbound or unwanted oligonucleotides). Centrifuge sample to concentrate. Concentrated sample should contain microvesicles.

[0766] Wash concentrate. Variant 1: Dilute concentrate with buffer specified above to the original volume and repeat centrifugation. Variant 2: Dilute concentrate with buffer specified above to the original volume and transfer concentrate to new filter unit and centrifuge. Repeat twice.

[0767] Recover concentrate and elute oligonucleotides bound to microvesicles.

[0768] Amplify and purify the eluted oligonucleotides.

[0769] Oligonucleotide sequencing (for example, Next generation methods; Ion Torrent: fusion PCR, emulsion PCR, sequencing).

[0770] Assess oligonucleotide profile.

[0771] Protocol 4:

[0772] Ultracentrifugation of 1-5 ml bodily fluid sample (120K×g, no sucrose) with 2 washes of the precipitate to isolate microvesicles.

[0773] Pre-mix microvesicles with oligonucleotide pool.

[0774] Load sample into 300K MWCO filter unite and centrifuge (2000×g). Concentration rate is ˜3×.

[0775] Wash concentrate. Variant 1: Dilute concentrate with buffer specified above to the original volume and centrifuge. Repeat twice. Variant 2: Dilute concentrate with buffer specified above to the original volume and transfer concentrate to new filter unit and centrifuge. Repeat twice

[0776] Recover concentrate and elute oligonucleotides bound to microvesicles.

[0777] Amplify and purify the eluted oligonucleotides.

[0778] Oligonucleotide sequencing (for example, Next generation methods; Ion Torrent: fusion PCR, emulsion PCR, sequencing).

[0779] Assess oligonucleotide profile.

[0780] In alterations of the above protocols, polymer precipitation is used to isolate microvesicles from the patient samples. For example, the oligonucleotides are added to the sample and then PEG4000 or PEG8000 at 4% or 8% concentration is used to precipitate and thereby isolate microvesicles. Elution, recovery and sequence analysis continues as above.

### Example 17: Plasma/Serum Probing with an Oligonucleotide Probe Library

[0781] The following protocol is used to probe a plasma or serum sample using an oligonucleotide probe library.

[0782] Input oligonucleotide library:

[0783] Use 2 ng input of oligonucleotide library per sample.

[0784] Input oligonucleotide library is a mixture of two libraries, cancer and non-cancer enriched, concentration is 16.3 ng/ul.

[0785] Dilute to 0.2 ng/ul working stock using Aptamer Buffer (3 mM MgCl₂ in 1×PBS)

[0786] Add 10 ul from working stock (equal to 2 ng library) to each optiseal tube

[0787] Materials:

[0788] PBS, Hyclone SH30256.01, LN: AYG165629, bottle#8237, exp. July 2015

[0789] Round Bottom Centrifuge Tubes, Beckman 326820, LN:P91207

[0790] OptiSeal Centrifuge tubes and plugs, polyallomer Konical, Beckman 361621, lot# Z10804SCA

[0791] Ultracentrifuge rotor: 50.4 TI

[0792] Ultracentrifuge rotor: 50.4 TI, Beckman Caris ID#0478

[0793] Protocol:

[0794] 1 Pre-chill tabletop centrifuge, ultracentrifuge, buckets, and rotor at 4° C.

[0795] 2 Thaw plasma or serum samples

[0796] 3 Dilute 1 ml of samples with 1:2 with Aptamer Buffer (3 mM MgCl₂ in 1×PBS)

[0797] 4 Spin at 2000×g, 30 min, 4° C. to remove debris (tabletop centrifuge)

[0798] 5 Transfer supernatants for all samples to a round bottom conical

[0799] 6 Spin at 12,000×g, 45 min, 4° C. in ultracentrifuge to remove additional debris.

[0800] 7 Transfer supernatant about 1.8 ml for all samples into new OptiSeal bell top tubes (uniquely marked).

[0801] 8 Add 2 ng (in 10 ul) of DNA Probing library to each optiseal tube

[0802] 9 QS to 4.5 ml with Aptamer Buffer

[0803] 10 Fix caps onto the OptiSeal bell top tubes

[0804] 11 Apply Parafilm around caps to prevent leakage

[0805] 12 Incubate plasma and oligonucleotide probe library for 1 hour at room temperature with rotation

[0806] 13 Remove parafilm (but not caps)

[0807] 14 Place correct spacer on top of each plugged tube

[0808] 15 Mark pellet area on the tubes, insure this marking is facing outwards from center.

[0809] 16 Spin tubes at 120,000×g, 2 hr, 4° C. (inner row, 33,400 rpm) to pellet microvesicles.

[0810] 17 Check marking is still pointed away from center.

[0811] 18 Completely remove supernatant from pellet, by collecting liquid from opposite side of pellet marker and using a 10 ml syringe barrel and 21G2 needle

[0812] 19 Discard supernatant in appropriate biohazard waste container

[0813] 20 Add 1 ml of 3 mM MgCl2 diluted with 1×PBS

[0814] 21 Gentle vortex, 1600 rpm for 5 sec and incubate 5 min at RT.

[0815] 22 QS to −4.5 mL with 3 mM Mg C12 diluted with 1×PBS

[0816] 23 Fix caps onto the OptiSeal bell top tubes.

[0817] 24 Place correct spacer on top of each plugged tube.

[0818] 25 Mark pellet area on the tubes, insure this marking is facing outwards from center.

[0819] 26 Spin tubes at 120,000×g, 70 min, 4° C. (inner row 33,400 rpm) to pellet microvesicles

[0820] 27 Check marking in still pointed away from center.

[0821] 28 Completely remove supernatant from pellet, by collecting liquid from opposite side of pellet marker and using a 10 ml syringe barrel and 21G2 needle

[0822] 29 Discard supernatant in appropriate biohazard waste container

[0823] 30 Add 1 ml of 3 mM MgCl2 diluted with 1×PBS

[0824] 31 Gentle vortex, 1600 rpm for 5 sec and incubate 5 min at RT.

[0825] 32 QS to −4.5 mL with 3 mM Mg C12 diluted with 1×PBS

[0826] 33 Fix caps onto the OptiSeal bell top tubes.

[0827] 34 Place correct spacer on top of each plugged tube.

[0828] 35 Mark pellet area on the tubes, insure this marking is facing outwards from center.

[0829] 36 Spin tubes at 120,000×g, 70 min, 4° C. (inner row 33,400 rpm) to pellet microvesicles

[0830] 37 Check marking is still pointed away from center.

[0831] 38 Save an aliquot of the supernatant (100 ul into a 1.5 ml tube)

[0832] 39 Completely remove supernatant from pellet, by collecting liquid from opposite side of pellet marker and using a 10 ml syringe barrel and 21G2 needle

[0833] 40 Add 50 ul of Rnase-free water to the side of the pellet

[0834] 41 Leave for 15 min incubation on bench top

[0835] 42 Cut top off tubes using clean scissors.

[0836] 43 Resuspend pellet, pipette up and down on the pellet side

[0837] 44 Measure the volume, make a note on the volume in order to normalize all samples

[0838] 45 Transfer the measured resuspended eluted microvesicles with bound oligonucleotides to a Rnase free 1.5 ml Eppendorf tube

[0839] 46 Normalize all samples to 100 ul to keep it even across samples and between experiments.

[0840] Next Generation Sequencing Sample Preparation:

[0841] I) Use 50 ul of sample from above, resuspended in 100 ul H2O and containing microvesicle/oligo complexes, as template in Transposon PCR, 14 cycles.

[0842] II) AMPure transposon PCR product, use entire recovery for indexing PCR, 10 cycles.

[0843] III) Check indexing PCR product on gel, proceed with AMPure if band is visible. Add 3 cycles if band is invisible, check on gel. After purification quantify product with QuBit and proceed with denaturing and diluting for loading on HiSeq flow cell (Illumina Inc., San Diego, Calif.).

[0844] IV) 5 samples will be multiplexed per one flow cell. 10 samples per HiSeq.

### Example 18: Enrichment of Oligonucleotides to Breast Cancer (BrCa) and Non-BrCa Derived Microvesicles

[0845] In this Example, a naive oligonucleotide probe library is screened to enrich oligonucleotides that identify microvesicles circulating in the blood of breast cancer patients and microvesicles circulating in the blood of healthy, control individuals (i.e., without breast cancer). The procedure in this Example used the 9-round selection scheme shown in FIG. 11A.

[0846] In FIGS. 11A-11B, the following abbreviations are used: CE—Cancer exosome samples; NCE—Non—cancer exosome samples; CNE—Cancer no exosome samples; NCNE—Non—cancer no exosome samples; MFI—Median Fluorescence Intensity; GC—GC content group analysis; Heat—heat elution; NaOH—sodium hydroxide elution. The terms exosome and microvesicle are used interchangeably.

[0847] As indicated in FIG. 11A, 0.1 mg/mL salmon sperm DNA was added as a competitor in selection rounds 7-9. FIG. 11B shows the enrichment of aptamers that bind to microvesicles (CE and NCE). Binding was determined by fluorescently labeling aptamer candidates and detecting binding to bead-capture microvesicles using a microbead assay format. At the end of round 9, only aptamers having GC content between ˜30% and 70% were selected to generate panels to differentiate cancer and non-cancer samples. In addition, several groups of aptamers were selected using the following criteria: 1) 12 most commonly observed; 2) 12 most commonly observed having >2-fold change in binding observed between cancer and normal samples; 3) 30 most commonly observed having >2-fold change in binding observed between cancer and normal samples, >10 read counts in the library determined by high throughput sequencing, heat elution after selection round 9; and 4) 30 most commonly observed having >2-fold change in binding observed between cancer and normal samples, >10 read counts in the library determined by high throughput sequencing, NaOH elution after selection round 9.

[0848] Retained sequences are shown in Table 12 with selection criteria 1-4 indicated. In Table 12, the sequences are shown 5′ to 3′ from left to right, wherein each complete sequence consists of a 5′ leader sequence 5′-GCTGTGTGACTCCTGCAA (SEQ ID NO. 45) followed by the indicated Variable Sequence followed by the 3′ tail sequence 5′-GCAGCTGTATCTTGTCTCC (SEQ ID NO. 46).

TABLE 12
BrCa microvesicle oligonucleotide sequences

| SEQ | | |
|---|---|---|
| ID | Selection | |
| NO. | Criteria | Variable Sequence |
| 47 | 3 | GTCCGCTTGGGGGTGGGTATCGAAAATTCGCGTTCTGGGGCGG |
| 48 | 3 | CTTCGCTCGTTTCAATGTTCAGTTCTGGTCTTTAGGTCTTTAG |
| 49 | 3 | TAGGAGGATAATATGTATCCGGTGCATCGGCCTGACTTTCCCC |
| 50 | 3 | TAGGAGGGCTGAAAACTTGCTTCTTCCCGGTGCAGTTATAACA |
| 51 | 3 | TAGGAGGATAATATGTATCCGATGCATGGGCCCGACTTTCCCC |
| 52 | 3 | TGCGTTTTCCTTGGGGTTCAGGGTAGGATGGGGGTGGAGGTGG |
| 53 | 3 | GGGGGGCGGGTGGGCTGGTAAAAGGTGATGCGGGGGTATTGTT |
| 54 | 3 | TAGGAGGATAATATGTATCCGGTGCATCGGCCCAACTTTCCCC |
| 55 | 3 | CCAATCTCGGAAGGTTTAAATAAGGTGGTCTTTAGGTCTTTAG |
| 56 | 3 | TACGTTAAGTGGGTCGGGAGGGGGGAATAGGGGGTTTGGTTGG |
| 57 | 3 | GTGAGGTCGGTGGGGCGGGGGATGGTGGGGGGTCGTTTACATT |
| 58 | 3 | CGATATTGGGGGGGGGTTGGCGGGCTATTTTCCGGGTGGGTG |
| 59 | 3 | TCGGTTCCTGTTAATTCGCTGGTGGTTGGTGGGGTGGCGGATG |
| 60 | 3 | GCGGGGAGGTGGGGGTGGGTGGAGGGTTGGTTACTCTCTACT |
| 61 | 3 | CGGGAATGGGAGGGTGGGGGTGGTGGCCGGGTCGTGTTATACC |
| 62 | 3 | TAGGAGGATAATATGTATCCGGTGCATCGGTCCGACTTTCCCC |
| 63 | 3 | TATAGTTGGGCGTAGGCGGGGGGGGGTGGTTGGGAGGTCCAAG |
| 64 | 3 | TAGGAGGATAATATGTATCCGGTGCATCGGCCCGACCTTCCCC |
| 65 | 3 | TCGATCGTCCTCAGGATCTCGTGGTTCAAATCATAAAGATTAT |
| 66 | 3 | TGCTGTCTGGGCGGGGGCGGTCTTGTGGTTTCTTTGGGGGGGG |
| 67 | 3 | GCGAGACAGGAGGGTGGTCTTATACGTGGGGGGGGGTGGTTGG |
| 68 | 3 | TAGGAGGGCTGAAGACTTGCTTCTTCCCGGTGCAGTTATAACA |
| 69 | 3 | CGTGTGGGGGGTGGGTTGGGCTCGGGTTGTTATCAGTTCCATG |
| 70 | 3 | CGATATTGGGGGGGGGGTTGGCGGGCTATTTTCCGGGTGGGTG |
| 71 | 3 | TAGGAGGATAATATGTATCCGGTGCATCGGCCCGACTTTCCTC |
| 72 | 3 | TAGGAGGATAATATGTATCCGGTGCATCGGCTCGACTTTCCCC |
| 73 | 3 | CTTCGCTCGTTTCAATGTTTAGTTCTGGTCTTTAGGTCTTTAG |
| 74 | 3 | GGACATGGGTTGGGTCGGGAGGGGGTGGTCGGTTGGGCAGTAA |
| 75 | 3 | TAGGAGGATAATATGTATACGATGCATCGGCCCGACTTTCCCC |
| 76 | 3 | TAGGAGGATAATATGTATCAGATGCATCGGCCCGACTTTCCCC |
| 77 | 4 | TGGATGTATGGGGTCTCGGGGTGGGAGGGTTCAACTTATCTGG |
| 78 | 4 | GTCCGCTTGGGGGTGGGTATCGAAAATTCGCGTTCTGGGGCGG |
| 79 | 4 | TCTTGTACAAATAGGAGGGAAGGGGGTTTTGGGAGGTGGGTGG |
| 80 | 4 | CTTCGCTCGTTTCAATGTTCAGTTCTGGTCTTTAGGTCTTTAG |
| 81 | 4 | CTGATGTTAGTAGGTCGGGGTCCGGTTGGGGGTTGGGTTGAGG |
| 82 | 4 | TGGCTCGTGGACGTGGTGGTGGCGGGTCGTGGGGGTGGGTAGG |
| 83 | 4 | TAGGAGGATAATATGTATCCGATGCATCGGCACGACTTTCCCC |
| 84 | 4 | CGGGGAGGGGGGGTCGGGGTATTTATTGTGTATGTTTTTTGTG |
| 85 | 4 | TGACTGTATCTTGGGGCGGGTTCTGGGGGGGGTGTATTGTTCA |
| 86 | 4 | TAGGAGGATAATATGTATCCGATGCATCGGCCCGACTTTCACC |
| 87 | 4 | TCATGTCTAGGGGGGGGAAGTCGGTTTGGGTGGGTACTCTGTG |
| 88 | 4 | CTTGTTTCGCTTTGGGTTTGGGCGGGTGGGTCAATTCCTGTTG |
| 89 | 4 | GGTGGGGGCCCTCGGTACTGTGGCGGGGTGGGTGGGTTTAGTG |
| 90 | 4 | TGCGTTTTCCTTGGGGTTCAGGGTAGGATGGGGGTGGAGGTGG |
| 91 | 4 | TGGTGGGGTGGGTCTGTGGGGTGGTTTTGTTCTTATCGGGGTT |
| 92 | 4 | TGGGTGGGTTACGGGTGGGTGTTGTTATCGCGCTGATCTGGTT |
| 93 | 4 | CGTGACGGTTTTAATCAGGGGGGGGACTCTAACATTTGGGTGG |
| 94 | 4 | TGCTCATATCGTGGGGGGATGGGGTTGCTAGTGGATGGGGTGG |
| 95 | 4 | GGGGGGCGGGTGGGCTGGTAAAAGGTGATGCGGGGGTATTGTT |
| 96 | 4 | TGATGTGGGGGGTGGGGTATAATACTTATGTTTGGGGTTTGGG |
| 97 | 4 | TTGGGTGGGTGGGAATGGGTATTTTTTCTTCGGGCGATGTTTG |
| 98 | 4 | TAGTTGGATACTGGATTTGGGAGGGATGGGGGGAGGAGGGTGG |
| 99 | 4 | CTGGAAGGTTGGGTGTGGGGCGGGGGGGAGGTCTCTCTATGT |
| 100 | 4 | TACGTTAAGTGGGTCGGGAGGGGGGAATAGGGGGTTTGGTTGG |
| 101 | 4 | TGCCGTGGGCCGGGGAGGGTGGGTTGGCGTCTCTGTTTCGATA |
| 102 | 4 | GGGGGGGCGGCCGGGGTGGACTGTGGCCCGTCTTCGTATTGTT |
| 103 | 4 | TGGTGGTGGCTGGGGGACGGGTATCCTGGAATTAGGGGTGGG |
| 104 | 4 | TCGGTTCATGTTGGGTGGGATCGGGGCGGGGTTTCTTCTCCTG |
| 105 | 4 | TAGGAGGATAATATGTATACGATGCATCGGCCCGACTTTCCCC |
| 106 | 4 | TCGTGGGTGTGTTCTGGGGGGCGTGGACGGGGGTTAATGGGCA |
| 107 | 1 | TAGGAGGATAATATGTATCCGATGCATCGGCCCGACTTTCCCC |
| 108 | 1 | TAAGAGTCTTAGGATGACGTCATTCGTCCGTCACGGTGCGGGA |
| 109 | 1 | GCCTGGCCAGATAGCAGTTACCTTACGGGATCTATATTCACCG |
| 110 | 1 | TGGCTCGTGGACGTGGTGGTGGCGGGTCGTGGGGGTGGGTAGG |
| 111 | 1 | TTCGTGTTCATCTGTTTATTGTTATTCACAATCCGTCTTTTGT |
| 112 | 1 | CGAATCCGTCGACCGCCCTCGTAACCATCCAACCCAGTCTCCT |
| 113 | 1 | CAGGAAAGTTACTTATCTTTTAGACGGTTATGTTCTCATTACT |
| 114 | 1 | ATCTGCTCGATACGTAGATAGTCTGCTCGATACAAAAGGGTGG |
| 115 | 1 | CGATGAGCGGGCTCCGATATTGTGTCGGCGTGACTACCTTGAT |
| 116 | 1 | GGTCGGCCTATTTATTGCGGCACGTTGTTTCTTGATGTCGCCC |
| 117 | 1 | TCGAATTCAGTTCTACATGTGTATTTCTTGCTCCGTTTCAGAA |
| 118 | 1 | TCGGTCCGGCAACAAACCCCACGCGCCTTCGATATGCCTGTCG |
| 119 | 2 | CCAATCTCGGAAGGTTTAAATAAGGTGGTCTTTAGGTCTTTAG |
| 120 | 2 | CGATATTGGGGGGGGGGTTGGCGGGCTATTTTCCGGGTGGGTG |
| 121 | 2 | CGGGAATGGGAGGGTGGGGGTGGTGGCCGGGTCGTGTTATACC |
| 122 | 2 | CGTGGTGGGTTCTTGGGTGGGGGGGGAGGGTTGGCGTAGTATA |
| 123 | 2 | GTGAGGTCGGTGGGGCGGGGGATGGTGGGGGGTCGTTTACATT |
| 124 | 2 | TACGTTAAGTGGGTCGGGAGGGGGGAATAGGGGGTTTGGTTGG |
| 125 | 2 | TAGGAGGATAATATGTATCCGGTGCATCGGCCCAACTTTCCCC |
| 126 | 2 | TAGGAGGGCTGAAAACTTGCTTCTTCCCGGTGCAGTTATAACA |
| 127 | 2 | TCGGTTCCTGTTAATTCGCTGGTGGTTGGTGGGGTGGCGGATG |
| 128 | 2 | TGCTGTCTGGGCGGGGGCGGTCTTGTGGTTTCTTTGGGGGGGG |
| 129 | 2 | AACATGGGGTTCTGATAAACCTGTGCCAAATACATTGTTGAGT |
| 130 | 2 | ATTCCTCCTTTGTAAGGGATGATATCCAACTCCTCTGCGTTCG |

[0849] Individual aptamer candidates in Table 12 are synthesized. The aptamers are labeled with a fluorescent label and used to detect binding to bead-capture microvesicles using a microbead assay format. The microbead results are used to identify aptamers and panels of aptamers that differentiate cancer and non-cancer plasma samples.

### Example 19: Aptamer Based Precipitation of Microvesicles in Plasma

[0850] Aptamers can specifically recognize target proteins with nanomolar affinity and have some potential advantages compared to antibodies due to their chemical stability, ease of synthesis and overall reproducibility. Microvesicles were isolated from a rat glioma cell line model that expresses or does not express the human EGFR protein in order to optimize aptamer-microvesicle complex formation and isolation in plasma. Microvesicles spiked into human plasma were precipitated with the positive EGFR DNA or RNA aptamer but not with a reverse complement control sequence. There was no observed binding of the positive or negative aptamer to microvesicles that do not express EGFR. Binding of aptamers to microvesicles was confirmed with aptamer based ELISAs, EMSA assays, and flow cytometry. These results demonstrate aptamer-based precipitation of microvesicles from a complex biological sample.

### Example 20: Quantitative Proteomics of EGFR, EGFRviii, and EGFR Negative Microvesicles from a Rat Glioma Cell Line

[0851] In this Example, we performed quantitative proteomics on microvesicles isolated from a rat glioma cell line F98 (parental line), F98(EGFR) and F98(EGFRviii). Different lots of microvesicles purified from each cell line type were considered biological replicates and each biological replicate was analyzed in four technical replicates by tandem mass tag 6-plex (TMT) peptide labeling and LC-MS/MS. The general microvesicle markers CD81, CD9, CD63, Tsg101, and Alix were identified in all technical replicates. Multiple proteins were found to be up or down-regulated including a 7.5-fold increase in EGFR and a 2.6-fold increase in the EGFR binding partner HMCN2 in the F98[EGFR] compared with the parental line. These results indicate that expression of a single biomarker may affect global proteomic changes in microvesicles.

### Example 21: Oligonucleotide Probe Library

[0852] This Example presents further development of the oligonucleotide probe library to detect biological entities such as described in Example 18 above. In this Example, steps were taken to reduce the presence of double stranded oligonucleotides (dsDNA) when probing the patient samples. The data were also generated comparing the effects of 8% and 6% PEG used to precipitate microvesicles (and potentially other biological entities) from the patient samples.

[0853] Protocol:

[0854] 1) Pre-chill tabletop centrifuge at 4° C.

[0855] 2) Protease inhibition: dissolve 2 tablets of “cOmplete ULTRA MINI EDTA-free EASYpack” protease inhibitor in 1100 ul of H₂O (20× stock of protease inhibitor).

[0856] 3) Add 50 ul of protease inhibitor to the sample (on top of frozen plasma) and start thawing: 1 ml total ea.

[0857] 4) To remove cells/debris, spin samples at 10,000×g, 20 min, 4° C. Collect 1 ml supernatant (SN).

[0858] 5) Mix 1 ml supernatant from step 4 with 1 ml of 2×PBS 6 mM MgCl₃, collect 400 ul into 3 tubes (replicates A, B, C) and use it in step 6.

[0859] 6) Add competitor per Table 13: make dilutions in 1×PBS, 3 mM MgCl₂, mix well, pour into trough, pipet using multichannel.

TABLE 13
Competitors

| | | | Inter- | | Volume | | | |
|---|---|---|---|---|---|---|---|---|
| | | | mediate | | from stock | Buffer to | | |
| | | Stock | stock | Number | to make | make | Final | Final |
| | Type of | Concen- | concen- | of | intermediate | intermediate | Volume, | Concen- |
| units | Competitor | tration | tration | samples | stock, ul | stock | ul | tration |
| ng/ul | Salmon | — | 40 | — | — | — | 425.5 | 0.8 |
| | DNA | | | | | | | |
| ng/ul | tRNA | — | 40 | — | — | — | 425.5 | 0.8 |
| x | S1 | 20 | 0.5 | 280 | 65.5 | 2555.6 | 425.5 | 0.01 |

[0860] 7) Incubate for 10 min, RT, end-over-end rotation

[0861] Pool of 6-3S and 8-3S oligonucleotide probing libraries is ready: 2.76 ng/ul (˜185 ng). Save pool stock and dilutions. New pool can be made by mixing 171.2 ul (500 ng) of library 6-3S (2.92 ng/ul) with 190.8 ul (500 ng) of library 8-3S (2.62 ng/ul). Aliquot pooled library into 30 ul and store at −80 C.

[0862] Add ssDNA oligonucleotide probing library to the final concentration 2.5 pg/ul for binding. Make dilutions in 1×PBS, 3 mM MgCl₂.

TABLE 14
Probe library calculations

| | | | | | | | Volume | |
|---|---|---|---|---|---|---|---|---|
| | | | ul from | | | | per | |
| | | Required | original | ul of | | | sample | Final |
| Original | | working | stock to | buffer to | Final | Number | from | concen- |
| stock, | Lib | stock | make | make | volume, | of | working | tration |
| ng/ul | Name | (ng/ul) | working | working | ul | samples | stock | (pg/ul) |
| 2.76 | Pooled | 0.1 | 26.1 | 694.1 | 720.2 | 60 | 10.9 | 2.5 |
| | library | | | | | | | |
| | 6-3S/8-3S | | | | | | | |

[0863] 8) Binding: Incubate for 1 h at RT with rotation.

[0864] 9) Prepare polymer solution: 20% PEG8000 in 1×PBS 3 mM MgCl2 (dilute 40% PEG8000 with 2×PBS with 6 mM MgCl2). Add 20% PEG8000 to sample to the final concentration 6%. Invert few times to mix, incubate for 15 min at 4 C

TABLE 15
PEG calculations

| | | | | | Volume | | | |
|---|---|---|---|---|---|---|---|---|
| | | | | | of | | | |
| | | | | | buffer | | | |
| | | | | | to | Sample | | Total |
| | | | | Volume | adjust | volume | | 20% |
| | PEG | Final | Final | 20% | final | before | Total | PEG |
| PEG | stock, | conc., | volume, | PEG to | volume, | adding | sam- | needed, |
| MW | % | % | ul | add, ul | ul | PEG | ples | ml |
| 8000 | 20 | 6 | 622.8 | 186.9 | −0.4 | 436.4 | 60 | 11.2 |

[0865] 10) Spin at 10,000×g for 5 min, RT.

[0866] 11) Remove SN, add 1 ml 1×PBS, 3 mM MgCl2 and wash pellet by gentle inversion with 1 ml aptamer buffer.

[0867] 12) Remove buffer, Re-suspend pellets in 100 ul H2O: incubate at RT for 10 min on mixmate 900 rpm to re-suspend.

[0868] 13) Make sure each sample is re-suspended by pipeting after step 13. Make notes on hardly re-suspendable samples.

[0869] 14) 50 ul of re-suspended sample to indexing PCR->next generation sequencing (NGS).

[0870] 15) Keep leftover at 4 C

[0871] Technical Validation:

[0872] The current protocol was tested versus a protocol using 8% PEG8000 to precipitate microvesicles. The current protocol further comprises steps to reduce dsDNA in the oligonucleotide probing libraries.

[0873] FIG. 12A shows the within sample variance (black) between binding replicates and the between sample variance (grey). Black is on top of grey, thus any observable grey oligo is informative about differences in the biology of two patient samples. This evaluation of Sources of Variance shows that the technical variances is significantly smaller than the biological variance.

[0874] FIG. 12B shows the impact of using a higher proportion of single stranded DNA and PEG 6% isolation (white bars) compared to when there is a higher amount of double stranded DNA and 8% PEG (grey). This data indicates that the protocol in this Example improves biological separation between patients.

[0875] The plots in FIG. 12C show the difference between an earlier protocol (PEG 8% with increased dsDNA) and a modified protocol of the Example (PEG 6% no dsDNA). The black is the scatter between replicates (independent binding events) and the grey is the difference between patients. This data shows that the signal to noise increased significantly using the newer protocol.

[0876] Patient Testing:

[0877] The protocol above was used to test patient samples having the following characteristics:

TABLE 16
Patient characteristics

| Sample Type | Description |
|---|---|
| Cancer | Mixed type carcinoma; Malignant; |
| Cancer | Invasive, predominant intraductal component (8500/3) |
| Cancer | Fibrocystic Changes; Invasive lobular carcinoma - 8520/3; Lobular carcinoma in |
| | situ - 8520/2; Benign; In situ and grade 3 intraepith; Malignant; Fat necrosis, |
| | periductal inflammation, malignant cellsFat necrosis; Inflammation; Benign; |
| Cancer | Invasive, predominant intraductal component (8500/3) |
| Cancer | Mucinous (colloid) adenocarcinoma (8480/3) |
| Cancer | Invasive lobular carcinoma - 8520/3; Microcalcifications; Benign; Malignant; |
| Cancer | Otherfibrocystic changeInvasive, NOS (8500/3) |
| Cancer | Invasive ductal carcinoma, not otherwise specified (NOS) - 8500/3; Malignant; |
| Cancer | Invasive ductal carcinoma, not otherwise specified (NOS) - 8500/3; Malignant; |
| Cancer | Intraductal carcinoma, non-infiltrating, NOS (in situ) (8500/2) |
| Cancer | Atypical lobular hyperplasia |
| | Otherfibrocystic changes, inter and intralobular fibrosis, apocrine metaplasia, |
| | columnar cell change, microcalcificationsInvasive, NOS (8500/3) |
| Cancer | FibroadenomaInvasive, NOS (8500/3) |
| Cancer | Ductal carcinoma in situ - 8500/2; Invasive ductal carcinoma, not otherwise |
| | specified (NOS) - 8500/3; Microcalcifications; Benign; In situ and grade 3 |
| | intraepith; Malignant; |
| Cancer | Ductal carcinoma in situ - 8500/2; Invasive lobular carcinoma - 8520/3; Lobular |
| | carcinoma in situ - 8520/2; In situ and grade 3 intraepith; Malignant; |
| Cancer | Ductal carcinoma in situ - 8500/2; Invasive ductal carcinoma, not otherwise |
| | specified (NOS) - 8500/3; Microcalcifications; Benign; In situ and grade 3 |
| | intraepith; Malignant; Focal Micropapillary Features, invasive ductal carcinoma |
| | with micropapillary features, invasive ductal carcinoma with mucinous and |
| | micropapillary featInvasive ductal carcinoma with micropapillary and mucinous |
| | features; Invasive micropapillary carcinoma - 8507/3; Malignant; |
| Cancer | Invasive, predominant intraductal component (8500/3) |
| Cancer | Invasive ductal carcinoma, not otherwise specified (NOS) - 8500/3; Malignant; |
| Cancer | Invasive, NOS (8500/3) |
| Cancer | Infiltrating duct and lobular carcinoma (8522/3) |
| Cancer | Invasive, predominant in situ component (8520/3) |
| Non-Cancer | Otherusual ductal hyperplasia, apocrine metaplasia, microcysts, elastosis |
| Non-Cancer | Otherstromal fibrosis, fibrous cyst wall |
| Non-Cancer | Otherfibrocystic change, stromal fibrosis, cyst formation, microcalcifications, |
| | apocrine metaplasia, sclerosing adenosis, usual ductal hyperplasia |
| Non-Cancer | Otherfibrocystic changes, apocrine metaplasia, cystic change, usual ductal |
| | hyperplasia |
| Non-Cancer | Otherfibrocystic change, microcalcifications |
| Non-Cancer | Fibroadenoma |
| Non-Cancer | Otherintraductal papilloma, sclerosis, microcalcifications, stromal fibrosis |
| Non-Cancer | Fibroadenoma |
| Non-Cancer | Otherfat necrosis |
| Non-Cancer | Otherstromal fibrosis, microcalcifications |
| Non-Cancer | Otherfibrocystic change, microcystic change, focal secretory features |
| Non-Cancer | Otherstromal fibrosis |
| Non-Cancer | Fibroadenoma Otheradenosis, columnar cell change/hyperplasia, usual ductal |
| | hyperplasia |
| Non-Cancer | OtherFNA - insufficient material for diagnosis |
| Non-Cancer | Otherintraductal papilloma |
| Non-Cancer | Otherfibrocystic changes, duct ectasia, usual ductal hyperplasia, apocrine |
| | metaplasia, microcalcifications |

[0878] Microvesicles (and potentially other biological entities) were precipitated in blood (plasma) samples from the above patients using polymer precipitation with PEG as indicated above. The protocol was used to probe the samples with the oligonucleotide probe libraries. Sequences that bound the PEG precipitated samples were identified using next generation sequencing (NGS).

[0879] FIG. 12D shows scatter plots of a selection of results from testing the 40 patients listed previously. The spread in the data indicates that large numbers of oligos were detected that differed between samples. The number of significant oligos found is much greater than would be expected randomly as shown in Table 17. The table shows the number of oligonucleotides sorted by copy number detected and p-value. The d-# indicates the number copies of a sequence observed for the data in the rows.

TABLE 17
Expected versus observed sequences

| | Total Number | P-0.1 | P-0.05 | P-0.01 | P-0.005 |
|---|---|---|---|---|---|
| d-50 | 83,632 | 47,020 | 30,843 | 5,934 | 2,471 |
| d-100 | 52,647 | 29,106 | 19,446 | 3,893 | 1,615 |
| d-200 | 28,753 | 14,681 | 9,880 | 2,189 | 914 |
| d-500 | 10,155 | 4,342 | 2,927 | 725 | 315 |
| d-50 | 100.0% | 56.2% | 36.9% | 7.1% | 3.0% |
| d-100 | 100.0% | 55.3% | 36.9% | 7.4% | 3.1% |
| d-200 | 100.0% | 51.1% | 34.4% | 7.6% | 3.2% |
| d-500 | 100.0% | 42.8% | 28.8% | 7.1% | 3.1% |

| | | | | |
|---|---|---|---|---|
| Maximum expected | 10.0% | 5.0% | 1.0% | 0.5% |

[0880] As a control, the cancer and non-cancer samples were randomly divided into two groups. Such randomization of the samples significantly reduced the number of oligos found that differentiate between sample groups. Indeed, there was a 50-fold increase in informative oligos between the cancer/non-cancer grouping versus random grouping. FIG. 12E shows data as in Table 17 and indicates the number of observed informative oligos between the indicated sample groups.

[0881] FIG. 12F shows distinct groups of oligos that differentiate between cancer and non-cancer samples. The figure shows a heatmap of the 40 samples tested with oligos selected that had more than 500 copies and p-value less than 0.005. There are clear subpopulations emerging with a distinct non-cancer cohort at the top. The non-cancer samples have boxes around them on the left axis. FIG. 12G is similar and shows results with an additional 20 cancer and 20 non-cancer samples. As shown, analysis with the 80 samples provides the emergence of more distinct and larger clusters.

[0882] The data for the additional 80 samples was also used to compare the consistency of informative oligos identified in different screening experiments. Of the 315 informative oligos identified using the first set of 40 patients, 86% of them showed fold-change in a consistent manner when tested on the independent set of 40 patients.

### Example 22: Enrichment of Oligonucleotide Probes to Breast Cancer (BrCa) and Non-BrCa Derived Microvesicles Using a Balanced Library Design

[0883] In this Example, a naïve ADAPT oligonucleotide library was screened to enrich oligonucleotides that identify microvesicles circulating in the blood of breast cancer patients and microvesicles circulating in the blood of healthy, control individuals (i.e., without breast cancer). The input library was the naïve F-TRin-35n-B 8-3s library, which comprises a 5′ region (5′ CTAGCATGACTGCAGTACGT (SEQ ID NO. 131)) followed by the random naïve aptamer sequences of 35 nucleotides and a 3″ region (5′ CTGTCTCTTATACACATCTGACGCTGCCGACGA (SEQ ID NO. 132)). The “balanced” design is described in Example 23 of Int'l Patent Publication WO/2015/031694 (Appl. No. PCT/US2014/053306, filed Aug. 28, 2014). The working library comprised approximately 2×10¹³ synthetic oligonucleotide sequences. The naïve library may be referred to as the “L0 Library” herein.

[0884] The L0 Library was enriched against fractionated plasma samples from breast cancer patients and from healthy (non-breast cancer) controls using the protocol shown in FIG. 21A. In Step 1, an aliquot of approximately 10¹¹ sequences of PCR-amplified L0 was incubated with pooled blood-plasma from 59 breast cancer patients with positive biopsy (represented by “Source A” in FIG. 21A). In parallel, another aliquot of 10¹¹ sequences was incubated with pooled blood-plasma from 30 patients with suspected breast cancer who proved negative on biopsy and 30 self declared healthy women (represented by “Source B” in FIG. 21A). In Step 2, microvesicles (extracellular vesicles, “EV”) were precipitated using ultracentrifugation (UC) from both L0-samples. The EV-associated oligodeoxynucleotides (ODNs) were recovered from the respective pellets. In Step 3, a counter-selection step (Step 3) was carried out by incubation of each enriched library with plasma from the different cohorts to drive the selection pressure towards enrichment of ODNs specifically associated with each sample cohort. In this step, sequences contained in the EV pellets were discarded. In Step 4, a second positive selection was performed. In this step, the sequences contained in the respective supernatants (sn) from Step 3 were mixed with plasma from another aliquot of each positive control sample-population, and EVs were again isolated. EV-associated ODNs were recovered, representing two single-round libraries called library L1 for positive enrichment of cancer (positive biopsy) patients, and library L2 for the positive enrichment against control patients. In a final step, L1 and L2 were amplified by PCR, reverted to single stranded DNA (ssDNA), and mixed to yield library L3.

[0885] This enrichment scheme was iterated two times more using L3 as the input to further reduce the complexity of the profiling library to approximately 10⁶ different sequences. In Step 2, UC was used for partitioning of microvesicles, which may increase the specificity for the EV fraction. In Steps 3 and 4, partitioning was performed using PEG-precipitation. This procedure enriches for ODNs specific for each biological source. Library L3 contains those ODNs that are associated with targets characteristic for EV-populations from both sources, i.e. ODNs acting as aptamers that bind to molecules preferentially expressed in each source. A total of biopsy-positive (n=59), biopsy-negative (n=30), and self-declared normal (n=30) were used in the first round of L3 enrichment, while only the cancer and non-cancer samples were used in the subsequent rounds.

[0886] The enriched libraries were characterized using next-generation-sequencing (NGS) to measure copy numbers of sequences contained in each profiling library. NGS of L0 shows that the vast majority of sequences existed in low copy numbers, whereas libraries L1 and L2 showed significantly higher average counts per sequence (FIG. 21B) and a reduced amount of different sequences, with unaltered total valid reads, (FIG. 21C) consistent with an enrichment process.

### Example 23: Analysis of ADAPT-Identified Biomarkers

[0887] As described herein, e.g., in the section entitled “Aptamer Target Identification,” an unknown target recognized by an aptamer can be identified. In this Example, an oligonucleotide probe library (also referred to as Adaptive Dynamic Artificial Poly-ligand Targeting (ADAPT) libraries or Topographical Oligonucleotide Probe “TOP” libraries) was developed as described here and targets of the screened oligonucleotides were determined. This Example used a ADAPT library generated by enriching microvesicles collected from the blood of breast cancer patients and normal controls (i.e., non-cancer individuals). The enrichment protocols are described herein in Example 22.

[0888] Materials & Methods

[0889] SBED Library Conjugation

[0890] A naïve F-TRin-35n-B 8-3s library was enriched against microvesicles from normal female plasma. The naïve unenriched library comprised a 5′ region (5′ CTAGCATGACTGCAGTACGT (SEQ ID NO. 131)) followed by the random naïve aptamer sequences of 35 nucleotides and a 3′ region (5′ CTGTCTCTTATACACATCTGACGCTGCCGACGA (SEQ ID NO. 132)). The naïve library may be referred to as the “L0 Library” herein and the enriched library referred to as the “L2 library.” See Example 22. The screened library was PCR amplified with a C6-amine sense primer (C6 Amine-5′ CTAGCATGACTGCAGTACGT 3′ (SEQ ID NO. 131)) and a 5′ phosphorylated anti-sense primer (5′ Phos TCGTCGGCAGCGTCA (SEQ ID NO. 133)), the purified product was strand separated and conjugated with sulfo-SBED (Thermo Scientific) according to Vinkenborg et al. (Angew Chem Int Ed Engl. 2012, 51:9176-80) with the following modifications: The reaction was scaled down to 5 μg C6-amine DNA library (8.6 μM) in 25 mM HEPES-KOH, 0.1M NaCl, pH 8.3 and incubated with either 100-fold molar excess of sulfo-SBED or DMSO in a 21 μL volume for 30 min at room temp in the dark. The SBED-conjugated library was immediately separated from the unconjugated library and free sulfo-SBED by injection onto a Waters X-Bridge™ OST C-18 column (4.6 mm×50 mm) and fractionated by HPLC (Agilent 1260 Infinity) with a linear gradient Buffer A: 100 mM TEAA, pH7.0, 0% ACN to 100 mM TEAA, pH7.0, 25% ACN at 0.2 ml/min, 65° C. There SBED-conjugated fractions were desalted into water with Glen Gel-Pak™ Cartridges and concentrated by speed-vac. SBED conjugation was confirmed by LC-MS and/or a dot blot with streptavidin-HRP detection.

[0891] Binding Reaction and Cross-Linking

[0892] SBED library functionalization was tested by performing the ADAPT assay with SBED vs DMSO mock conjugated control C6-amine library and sequenced on a HiSeq 2500™ (Illumina Corp.). The aptamer precipitation was performed with forty-eight ADAPT reactions incubated for 1 hr with end-over-end rotation at room temp with a 5 ng input of SBED conjugated library per 200 μL of plasma (pre-spun to remove cellular debris at 10,000×g for 20 min, 4° C.) in 1×PBS, 3 mM MgCl₂, 0.01 mM dextran sulfate, 40 ng/μl salmon sperm DNA and 40 ng/μl yeast transfer RNA, and cOmplete ULTRA Mini EDTA-free™ protease inhibitors (Roche) equivalent to ˜240 ng library and 9.6 mls plasma. A duplicate set of 48 reactions was prepared with the DMSO control C6-amine library. Aptamer library-protein complexes were precipitated with incubation in 6% PEG8000 for 15 min at 4° C. then centrifuged at 10,000×g for 5 min. Pellets were washed with 1 ml 1×PBS, 3 mM MgCl2 by gentle inversion to remove unbound aptamers. The washed pellets were resuspended in 100 μL of water and subjected to photo-cross-linking at 365 nm with a hand-held 3 UV (254NM/302NM/365NM) lamp, 115 volts (Thermo Scientific) for 10 min on ice with 1-2 cm between the 96-well plate and lamp.

[0893] Oligonucleotide Precipitation

[0894] Cross-linked reactions were subsequently pooled (˜4.8 ml) per library or 4.8 ml of 1×PBS (AP bead only control) and incubated with 10 μL of Prepared Dynabeads® MyOne™ Streptavidin C1 (10 mg/ml) (Life Technologies) (pre-washed with 1×PBS, 0.01% Triton X-100) shaking for 1 hr at room temp. Beads were transferred to an eppendorf tube and lysed for 20 min with lysis buffer (50 mM Tris-HCl, 10 mM MgCl2, 200 mM NaCl, 0.5% Triton X-100, 5% glycerol, pH 7.5) on ice, washed 3 times with wash buffer 1 (10 mM Tris-HC, 1 mM EDTA, 2M NaCl, 1% Triton X-100), followed by 2 times with wash buffer 2 (10 mM Tris-HC, 1 mM EDTA, 2M NaCl, 0.01% Triton X-100) as described by Vinkenborg et al. (Angew Chem Int Ed Engl. 2012, 51:9176-80). Cross-linked proteins were eluted by boiling 15 min in 1×LDS sample buffer with reducing agent added (Life Technologies) and loaded on a 4-12% SDS-PAGE gradient gel (Life Technology). Proteins and DNA were detected with double staining with Imperial Blue Protein Stain (Thermo Scientific) followed by Prot-SIL2™ silver stain kit (Sigma) used according to manufacturer's instructions in order to enhance sensitivity and reduce background.

[0895] Protein Identification

[0896] Protein bands that appeared to differ between the cancer and normal were excised from the gradient gels and subjected to liquid chromatography-tandem mass spectrometry (LC-MS/MS).

[0897] Results

[0898] ADAPT protein targets were identified from bands cut from a silver stained SDS-PAGE gel (FIG. 13). Aptamer-SBED protein complexes (lane 3) or Aptamer-DMSO protein complexes (control-lane 4) were precipitated with 6% PEG8000, subjected to UV photo-cross-linking, and pulled-down with Streptavidin coated beads. Eluate was analyzed under reducing conditions by SDS-PAGE and silver staining. Aptamer library alone (5 ng) (lane 1) was loaded as a control for migration of the library (second to bottom arrows) and an equal volume of eluate from a bead only sample (lane 4) was loaded as a streptavidin control to control for potential leaching of the streptavidin monomer (bottom arrow) under the harsh elution conditions. Upper arrows (“Targets”) indicate specific or more predominant bands identified with the SBED-conjugated library vs. the mock DMSO treated control C6-amine library. Indicated target protein bands were cut out and sent for LC-MS/MS protein identification or indicated DNA library bands were eluted, reamplified and sequenced. The identified proteins are those that appeared as upregulated in the normal samples.

[0899] Tables 18-25 list human proteins that were identified in 8 bands excised from the silver stained gel. In all tables the proteins are those identified in the oligo-SBED protein complexes with proteins identified in the corresponding control lanes removed. The band numbers in the tables indicate different bands cut from the gel (FIG. 13). Accession numbers in the table are from the UniProt database (www.uniprot.org). “GN=” is followed by the gene name. Various protein classifications indicated in the Tables 18-25 include Nucleic Acid Binding Proteins (NAB), Tumor suppressors (TS), cell adhesion/cytoskeletal (CA/CK) and abundant plasma proteins (ABP).

TABLE 18
Band 3

| Accession | | |
|---|---|---|
| number | Class | Protein name |
| P02538 | CA/CK | Keratin, type II cytoskeletal 6A GN = KRT6A |
| P15924 | CA/CK | Desmoplakin GN = DSP |
| P04259 | CA/CK | Keratin, type II cytoskeletal 6B GN = KRT6B |
| P60709 | CA/CK | Actin, cytoplasmic 1 GN = ACTB |
| P20930 | CA/CK | Filaggrin GN = FLG |
| P07476 | CA/CK | Involucrin GN = IVL |
| P31947 | TS | 14-3-3 protein sigma GN = SFN |
| Q7Z794 | CA/CK | Keratin, type II cytoskeletal 1b GN = KRT77 |
| P02545 | NAB | Prelamin-A/C GN = LMNA |
| P19012 | CA/CK | Keratin, type I cytoskeletal 15 GN = KRT15 |
| P47929 | CA/CK | Galectin-7 GN = LGALS7 |
| | & TS | |
| P11142 | | Heat shock cognate 71 kDa protein GN = HSPA8 |
| P58107 | NAB | Epiplakin GN = EPPK1 |
| P08107 | | Heat shock 70 kDa protein 1A/1B GN = HSPA1A |
| Q02413 | CA/CK | Desmoglein-1 GN = DSG1 |
| P06396 | CA/CK | Gelsolin GN = GSN |
| O60814 | NAB | Histone H2B type 1-K GN = HIST1H2BK |
| P68104 | NAB | Elongation factor 1-alpha 1 GN = EEF1A1 |
| P05387 | NAB | 60S acidic ribosomal protein P2 GN = RPLP2 |
| Q7RTS7 | CA/CK | Keratin, type II cytoskeletal 74 GN = KRT74 |
| P31946 | TS | 14-3-3 protein beta/alpha GN = YWHAB |
| Q13835 | CA/CK | Plakophilin-1 GN = PKP1 |
| P14923 | CA/CK | Junction plakoglobin GN = JUP |
| P09651 | NAB | Heterogeneous nuclear ribonucleoprotein A1 GN = HNRNPA1 |
| P07900 | | Heat shock protein HSP 90-alpha GN = HSP90AA1 |
| Q96KK5 | NAB | Histone H2A type 1-H GN = HIST1H2AH |
| P04406- | CA/CK | Glyceraldehyde-3-phosphate dehydrogenase GN = GAPDH |
| P10412 | NAB | Histone H1.4 GN = HIST1H1E |
| P04792 | | Heat shock protein beta-1 GN = HSPB1 |
| Q9NZT1 | | Calmodulin-like protein 5 GN = CALML5 |
| P81605 | | Dermcidin GN = DCD |
| P27348 | TS | 14-3-3 protein theta GN = YWHAQ |
| P55072 | NAB | Transitional endoplasmic reticulum ATPase GN = VCP |
| Q09666 | NAB | Neuroblast differentiation-associated protein AHNAK GN = AHNAK |
| P23246 | NAB | Splicing factor, proline- and glutamine-rich GN = SFPQ |
| Q15149 | CA/CK | Plectin GN = PLEC |
| Q8NC51 | NAB | Plasminogen activator inhibitor 1 RNA-binding protein GN = SERBP1 |
| P07237 | | Protein disulfide-isomerase GN = P4HB |
| O60437 | CA/CK | Periplakin GN = PPL |
| P01717 | ABP | Ig lambda chain V-IV region Hil |
| P55884 | NAB | Eukaryotic translation initiation factor 3 subunit B GN = EIF3B |
| P11021 | | 78 kDa glucose-regulated protein GN = HSPA5 |
| P01024 | | Complement C3 GN = C3 |
| P04350 | CA/CK | Tubulin beta-4A chain GN = TUBB4A |
| P01857 | ABP | Ig gamma-1 chain C region GN = IGHG1 |
| P61247 | NAB | 40S ribosomal protein S3a GN = RPS3A |
| P62937 | | Peptidyl-prolyl cis-trans isomerase A GN = PPIA |
| O15020 | CA/CK | Spectrin beta chain, non-erythrocytic 2 GN = SPTBN2 |
| P30101 | | Protein disulfide-isomerase A3 GN = PDIA3 |
| Q6KB66 | CA/CK | Keratin, type II cytoskeletal 80 GN = KRT80 |
| Q9UJU6 | CA/CK | Drebrin-like protein GN = DBNL |
| P47914 | NAB | 60S ribosomal protein L29 GN = RPL29 |
| P39023 | NAB | 60S ribosomal protein L3 GN = RPL3 |
| A6NMY6 | CA/CK | Putative annexin A2-like protein GN = ANXA2P2 |
| P60174 | CA/CK | Triosephosphate isomerase GN = TPI1 |
| P35241 | CA/CK | Radixin GN = RDX |
| P07305 | NAB | Histone H1.0 GN = H1F0 |
| P15259 | CA/CK | Phosphoglycerate mutase 2 GN = PGAM2 |
| P0CG05 | ABP | Ig lambda-2 chain C regions GN = IGLC2 |
| Q92817 | CA/CK | Envoplakin GN = EVPL |
| P06733 | NAB | MBP-1 of Alpha-enolase GN = ENO1 |
| P22626 | NAB | Heterogeneous nuclear ribonucleoproteins A2/B1 GN = HNRNPA2B1 |
| P62424 | NAB | 60S ribosomal protein L7a GN = RPL7A |
| P60660 | CA/CK | Myosin light polypeptide 6 GN = MYL6 |
| P04083 | NAB | Annexin A1 GN = ANXA1 |
| Q14134 | NAB | Tripartite motif-containing protein 29 GN = TRIM29 |
| P39019 | NAB | 40S ribosomal protein S19 GN = RPS19 |
| Q8WVV4 | CA/CK | Protein POF1B GN = POF1B |
| Q02878 | NAB | 60S ribosomal protein L6 GN = RPL6 |
| Q9Y6X9 | NAB | MORC family CW-type zinc finger protein 2 GN = MORC2 |
| Q9NQC3 | NAB | Reticulon-4 GN = RTN4 |
| Q5T753 | CA/CK | Late cornified envelope protein 1E GN = CA/CK E |

TABLE 19
Band 9

| Accession | | |
|---|---|---|
| number | Class | Protein name |
| P61626 | | Lysozyme C GN = LYZ |
| Q9HCK1 | NAB | DBF4-type zinc finger-containing protein |
| | | 2 GN = ZDBF2 |

TABLE 20
Band 1

| Accession | | |
|---|---|---|
| number | Class | Protein name |
| P01834 | ABP | Ig kappa chain C region GN = IGKC |
| P01765 | ABP | Ig heavy chain V-III region TIL |
| P04003 | NAB | C4b-binding protein alpha chain GN = C4BPA |
| P60709 | CA/CK | Actin, cytoplasmic 1 GN = ACTB |
| Q5T751 | CA/CK | Late cornified envelope protein 1C GN = LCE1C |

TABLE 21
Band 5

| Accession | | |
|---|---|---|
| number | Class | Protein name |
| P01860 | ABP | Ig gamma-3 chain C region GN = IGHG3 |
| O60902 | NAB | Short stature homeobox protein 2 GN = SHOX2 |

TABLE 22
Band 7

| Accession | | |
|---|---|---|
| number | Class | Protein name |
| Q04695 | CA/CK | Keratin, type I cytoskeletal 17 GN = KRT17 |
| Q7Z794 | CA/CK | Keratin, type II cytoskeletal 1b GN = KRT77 |
| Q6KB66 | CA/CK | Keratin, type II cytoskeletal 80 GN = KRT80 |
| P01833 | | Polymeric immunoglobulin receptor GN = PIGR |
| P01042 | | Kininogen-1 GN = KNG1 |
| Q02413 | CA/CK | Desmoglein-1 GN = DSG1 |
| P15924 | CA/CK | Desmoplakin GN = DSP |
| Q8TF72 | | Protein Shroom3 GN = SHROOM3 |
| P02671 | ABP | Fibrinogen alpha chain GN = FGA |
| Q5T749 | CA/CK | Keratinocyte proline-rich protein GN = KPRP |
| Q5VZP5 | | Inactive dual specificity phosphatase 27 |
| | | GN = DUSP27 |
| Q5T751 | CA/CK | Late cornified envelope protein 1C GN = LCE1C |
| Q9UL12 | | Sarcosine dehydrogenase, mitochondrial |
| | | GN = SARDH |
| P00698 | | Lysozyme C OS = Gallus gallus GN = LYZ |
| Q8N114 | | Protein shisa-5 GN = SHISA5 |

TABLE 23
Band 15

| Accession | | |
|---|---|---|
| number | Class | Protein name |
| P08238 | | Heat shock protein HSP 90-beta GN = HSP90AB1 |
| P68104 | NAB | Elongation factor 1-alpha 1 GN = EEF1A1 |
| P02675 | ABP | Fibrinogen beta chain GN = FGB |
| Q8TF72 | | Protein Shroom3 GN = SHROOM3 |
| P0CG05 | ABP | Ig lambda-2 chain C regions GN = IGLC2 |
| P78386 | CA/CK | Keratin, type II cuticular Hb5 GN = KRT85 |
| Q7Z5Y6 | | Bone morphogenetic protein 8A GN = BMP8A |
| O14633 | CA/CK | Late cornified envelope protein 2B GN = LCE2B |

TABLE 24
Band 17

| Accession | | |
|---|---|---|
| number | Class | Protein name |
| P02538 | CA/CK | Keratin, type II cytoskeletal 6A GN = KRT6A |
| P01834 | ABP | Ig kappa chain C region GN = IGKC |
| P06702 | | Protein S100-A9 GN = S100A9 |
| P68104 | NAB | Elongation factor 1-alpha 1 GN = EEF1A1 |
| P01024 | | Complement C3 GN = C3 |
| P81605 | | Dermcidin GN = DCD |
| P05109 | | Protein S100-A8 GN = S100A8 |
| Q5T751 | CA/CK | Late cornified envelope protein 1C GN = LCE1C |

TABLE 25
Band 19

| Accession | | |
|---|---|---|
| number | Class | Protein name |
| P02768 | NAB | Serum albumin GN = ALB |
| P0CG05 | ABP | Ig lambda-2 chain C regions GN = IGLC2 |
| P06702 | | Protein S100-A9 GN = S100A9 |
| P08238 | | Heat shock protein HSP 90-beta GN = HSP90AB1 |
| P60709 | CA/CK | Actin, cytoplasmic 1 GN = ACTB |
| P13647 | CA/CK | Keratin, type II cytoskeletal 5 GN = KRT5 |
| P01616 | ABP | Ig kappa chain V-II region MIL |
| Q86YZ3 | CA/CK | Hornerin GN = HRNR |
| P01857 | ABP | Ig gamma-1 chain C region GN = IGHG1 |
| P62805 | NAB | Histone H4 GN = HIST1H4A |
| P59665 | | Neutrophil defensin 1 GN = DEFA1 |
| P61626 | | Lysozyme C GN = LYZ |
| P01024 | ABP | Complement C3 GN = C3 |
| Q8TF72 | | Protein Shroom3 GN = SHROOM3 |
| P83593 | ABP | Ig kappa chain V-IV region STH (Fragment) |
| P01700 | ABP | Ig lambda chain V-I region HA |
| P01877 | ABP | Ig alpha-2 chain C region GN = IGHA2 |
| Q9UL12 | | Sarcosine dehydrogenase, mitochondrial |
| | | GN = SARDH |
| Q6NXT2 | NAB | Histone H3.3C GN = H3F3C |
| P02788 | NAB | Lactotransferrin GN = LTF |
| P02787 | ABP | Serotransferrin GN = TF |

[0900] Certain proteins were identified in multiple bands. For example, IGLC2 was identified in bands 3, 15 and 19 and SHROOM3 was identified in bands 7, 15, 19. This may be due to degradation products, isoforms or the like. These experiments identified 108 proteins (plus 2 lysozyme controls), comprising among others 34 Nucleic Acid Binding Proteins (NAB) where 7 of the 34 are putative tumor suppressors/repressors; 37 cell adhesion/cytoskeletal (CA/CK); and 14 abundant plasma proteins (ABP). All of the tumor suppressors/repressors are DNA/RNA binding proteins. Other proteins comprise chaperones, signaling molecules etc.

[0901] For comparison to the above pull-down results with the enriched L2 library, mass spectrometry was used to identify proteins in whole plasma samples (“neat plasma”) (Table 26, row “Neat”), in PEG enriched plasma fractions (comprising a microvesicle-containing fraction) (Table 26, row “PEG”), and in unenriched L0 library pull-down (Table 26, row “Unenriched”) using the same healthy (non-breast cancer) plasma samples as described above. Descriptions in the table comprise the gene name followed by accession numbers from the UniProt database (www.uniprot.org) in parentheses. 81 proteins were pulled down by L2 (Tables 18-25) that were not detectable in the PEG-precipitated and neat plasma, indicating that these proteins became enriched due to their interaction with L2 oligonucleotide probes. Further details are found in Example 28 of International Patent Application PCT/US15/62184, filed Nov. 23, 2015, which application is incorporated by reference herein in its entirety.

TABLE 26
Proteins identified in plasma

| Accession | Description (Gene Name (Accession)) |
|---|---|
| Neat | ALB (P02768), C3 (P01024), APOB (P04114), TF (P02787), A2M (P01023), C4B |
| | (P0C0L5), C4A (P0C0L4), FGA (P02671), FGB (P02675), CP (P00450), IGKC (P01834), |
| | IGHG1 (P01857), HP (P00738), FGG (P02679), IGHG3 (P01860), CFH (P08603), GC |
| | (P02774), IGHG2 (P01859), SERPINA1 (P01009), ITIH4 (Q14624), SERPINC1 (P01008), |
| | IGHM (P01871), HPR (P00739), CFB (P00751), APOA1 (P02647), FN1 (P02751), IGLL5 |
| | (B9A064), PLG (P00747), A1BG (P04217), ITIH2 (P19823), SERPINA3 (P01011), KNG1 |
| | (P01042), IGHG4 (P01861), APOA4 (P06727), F2 (P00734), HPX (P02790), C4BPA |
| | (P04003), ITIH1 (P19827), IGHA1 (P01876), IGLC2 (P0CG05), SERPING1 (P05155), |
| | GSN (P06396), PON1 (P27169), AGT (P01019), APOH (P02749), HRG (P04196), APCS |
| | (P02743), AFM (P43652), IGHA2 (P01877), APOE (P02649), AHSG (P02765), |
| | SERPIND1 (P05546), C5 (P01031), AMBP (P02760), ORM1 (P02763), AZGP1 (P25311), |
| | KRT1 (P04264), CFI (P05156), HBB (P68871), CD5L (O43866), C9 (P02748), RBP4 |
| | (P02753), VTN (P04004), SERPINA6 (P08185), SERPINF2 (P08697), CLU (P10909), |
| | KRT2 (P35908), C1QC (P02747), TTR (P02766), Ig kappa chain V-II region TEW |
| | (P01617), Ig heavy chain V-III region BUT (P01767), Ig heavy chain V-III region TUR |
| | (P01779), APOA2 (P02652), ORM2 (P19652), CFHR1 (Q03591), PGLYRP2 (Q96PD5), |
| | LYZ (P00698), Ig kappa chain V-IV region Len (P01625), Ig heavy chain V-III region |
| | GAL (P01781), IGHD (P01880), C1QB (P02746), C8A (P07357), C8G (P07360), KRT10 |
| | (P13645), APOL1 (O14791), IGJ (P01591), KLKB1 (P03952), Ig lambda chain V region |
| | 4A (P0421 1), Ig kappa chain V-III region VG (Fragment) (P04433), HBA1 (P69905), |
| | APOM (O95445), C1R (P00736), F12 (P00748), Ig lambda chain V-III region SH |
| | (P01714), Ig lambda chain V-IV region Hil (P01717), Ig heavy chain V-III region WEA |
| | (P01763), Ig heavy chain V-II region NEWM (P01825), LRG1 (P02750), IGKV4-1 |
| | (P06312), PROS1 (P07225), PRSS1 (P07477), C7 (P10643), C6 (P13671), CPN2 |
| | (P22792), SERPINF1 (P36955), Ig lambda chain V-III region LOI (P80748), ABCF1 |
| | (Q8NE71), FCN3 (O75636), F10 (P00742), Ig heavy chain V-I region HG3 (P01743), Ig |
| | heavy chain V-III region HIL (P01771), Ig heavy chain V-II region OU (P01814), Ig kappa |
| | chain V-I region BAN (P04430), APOD (P05090), C2 (P06681), C8B (P07358), LPA |
| | (P08519), C1S (P09871), HIST1H1D (P16402), Ig heavy chain V-I region V35 (P23083), |
| | LGALS3BP (Q08380), ATF7IP (Q6VMQ6), RASSF6 (Q6ZTQ3), MTMR14 (Q8NCE2), |
| | DCHS1 (Q96JQ0), HIST1H2AH (Q96KK5), HMCN1 (Q96RW7), UPF3A (Q9H1J1), |
| | IGLC7 (A0M8Q6), UNC13B (O14795), APBA3 (O96018), GSN (P06396), C4A |
| | (P0C0L4), PZP (P20742), SERPINA4 (P29622), SHMT2 (P34897), KRT9 (P35527), |
| | SEPP1 (P49908), COG7 (P83436), ITIH3 (Q06033), TMEM198 (Q66K66), F13A1 |
| | (P00488), Ig kappa chain V-I region Lay (P01605), S100A6 (P06703), KRT5 (P13647), |
| | CDH2 (P19022), SAA4 (P35542), RXRG (P48443), ARFGEF3 (Q5TH69), IQCE |
| | (Q6IPM2), C19orf68 (Q86XI8), CELSR3 (Q9NYQ7), C1RL (Q9NZP8), SARDH |
| | (Q9UL12), MYH4 (Q9Y623) |
| PEG | C3 (P01024), A2M (P01023), APOB (P04114), IGKC (P01834), C4A (P0C0L4), C4B (P0C0L5), |
| | FGB (P02675), ALB (P02768), CFH (P08603), IGHG1 (P01857), FGA (P02671), FN1 (P02751), |
| | PLG (P00747), IGHM (P01871), FGG (P02679), TF (P02787), C5 (P01031), CP (P00450), IGHG2 |
| | (P01859), IGLC2 (P0CG05), Ig mu heavy chain disease protein (P04220), ITIH1 (P19827), PZP |
| | (P20742), IGHG3 (P01860), IGLL5 (B9A064), HP (P00738), C4BPA (P04003), ITIH2 (P19823), |
| | IGHA1 (P01876), KRT1 (P04264), KRT10 (P13645), APOE (P02649), Ig kappa chain V-I region |
| | DEE (P01597), AMBP (P02760), F2 (P00734), C7 (P10643), C6 (P13671), ITIH4 (Q14624), CFB |
| | (P00751), IGHG4 (P01861), APOH (P02749), APOA1 (P02647), CD5L (O43866), C1R (P00736), |
| | HPR (P00739), Ig kappa chain V-I region Scw (P01609), IGHA2 (P01877), CFHR1 (Q03591), |
| | KRT2 (P35908), Ig kappa chain V-III region SIE (P01620), HRG (P04196), Ig heavy chain V-III |
| | region BRO (P01766), C1QB (P02746), GC (P02774), Ig heavy chain V-III region TIL (P01765), Ig |
| | kappa chain V-III region NG9 (Fragment) (P01621), Ig heavy chain V-III region BUT (P01767), Ig |
| | heavy chain V-III region TUR (P01779), C9 (P02748), SERPIND1 (P05546), Ig kappa chain V-I |
| | region WEA (P01610), Ig kappa chain V-I region Ni (P01613), Ig kappa chain V-IV region Len |
| | (P01625), Ig kappa chain V-I region EU (P01598), Ig kappa chain V-II region TEW (P01617), Ig |
| | heavy chain V-III region GAL (P01781), KNG1 (P01042), VTN (P04004), C8B (P07358), Ig |
| | lambda chain V-III region LOI (P80748), Ig heavy chain V-II region NEWM (P01825), APCS |
| | (P02743), KLKB1 (P03952), CFI (P05156), PROS1 (P07225), LPA (P08519), KRT9 (P35527), |
| | SERPINA1 (P01009), Ig lambda chain V-III region SH (P01714), C8A (P07357), Ig kappa chain V- |
| | III region B6 (P01619), Ig lambda chain V-IV region Hil (P01717), Ig kappa chain V-III region CLL |
| | (P04207), C1S (P09871), FCN3 (O75636), SERPINC1 (P01008), Ig kappa chain V-I region Mev |
| | (P01612), IGHD (P01880), C1QC (P02747), HPX (P02790), C8G (P07360), IGKV1-5 (P01602), Ig |
| | kappa chain V-I region Wes (P01611), Ig heavy chain V-III region WEA (P01763), A1BG |
| | (P04217), GSN (P06396), FBLN1 (P23142), HBB (P68871), ITIH3 (Q06033), F12 (P00748), |
| | SERPINA3 (P01011), APOC3 (P02656), Ig kappa chain V-I region BAN (P04430), Ig kappa chain |
| | V-III region VH (Fragment) (P04434), F13B (P05160), IGKV4-1 (P06312), SERPINF2 (P08697), |
| | CLU (P10909), HIST1H1D (P16402), PON1 (P27169), IGJ (P01591), Ig kappa chain V-III region |
| | POM (P01624), Ig heavy chain V-III region CAM (P01768), Ig heavy chain V-III region BUR |
| | (P01773), Ig kappa chain V-III region VG (Fragment) (P04433), APOD (P05090), Ig lambda chain |
| | V-IV region MOL (P06889), Ig heavy chain V-III region GAR (P80419), FCGBP (Q9Y6R7), |
| | APOM (O95445), F13A1 (P00488), Ig heavy chain V-I region HG3 (P01743), C1QA (P02745), Ig |
| | lambda chain V-VI region WLT (P06318), C2 (P06681), C4BPB (P20851), CFP (P27918), |
| | SERPINA4 (P29622), SAA4 (P35542), SERPINF1 (P36955), LGALS3BP (Q08380), HABP2 |
| | (Q14520), RCBTB1 (Q8NDN9), APOL1 (O14791), KCNQ2 (O43526), F9 (P00740), Ig heavy |
| | chain V-III region TRO (P01762), Ig heavy chain V-III region HIL (P01771), Ig heavy chain V-II |
| | region OU (P01814), APOA2 (P02652), F11 (P03951), Ig lambda chain V-I region WAH (P04208), |
| | Ig lambda chain V region 4A (P04211), Ig kappa chain V-II region RPMI 6410 (P06310), Ig kappa |
| | chain V-III region IARC/BL41 (P06311), KRT5 (P13647), IGLL1 (P15814), Ig heavy chain V-I |
| | region V35 (P23083), HBA1 (P69905), ADIPOQ (Q15848), PGLYRP2 (Q96PD5), UPF3A |
| | (Q9H1J1), BCO1 (Q9HAY6), ARFGAP3 (Q9NP61), SARDH (Q9UL12), SERPINA1 (P01009), |
| | KNG1 (P01042), Ig kappa chain V-I region Kue (P01604), Ig kappa chain V-I region Lay (P01605), |
| | Ig kappa chain V-I region OU (P01606), Ig kappa chain V-II region MIL (P01616), Ig heavy chain |
| | V-III region VH26 (P01764), Ig heavy chain V-III region GA (P01769), FN1 (P027510), TTR |
| | (P02766), SERPING1 (P05155), APOA4 (P06727), PRSS1 (P07477), ANXA6 (P08133), CFTR |
| | (P13569), LBP (P18428), FBLN1 (P23142), SPAG17 (Q6Q759), PDLIM2 (Q96JY6), ARHGEF17 |
| | (Q96PE2), IGLC7 (A0M8Q6), AGRN (O00468), AGT (P01019), RBP4 (P02753), AHSG (P02765), |
| | Ig kappa chain V-III region GOL (P04206), SERPINA5 (P05154), GSN (P06396), Ig kappa chain |
| | V-III region HAH (P18135), CFHR2 (P36980), GIT2 (Q141611), INCENP (Q9NQS7 |
| Unenriched | LYZ (P00698), IGHG1 (P01857), KRT14 (P02533), KRT6A (P02538), APOA1 (P02647), |
| | FGA (P02671), ALB (P02768), HSPB1 (P04792), COL1A2 (P08123), KRT16 (P08779), |
| | IGLC6 (P0CF74), KRT5 (P13647), DSP (P15924), DSP (P15924), LGALS7 (P47929), |
| | ACTG2 (P63267), DCD (P81605), DSG1 (Q02413), FLG2 (Q5D862), SBSN (Q6UWP8), |
| | KRT73 (Q86Y46), HRNR (Q86YZ3), KRT78 (Q8N1N4), SHROOM3 (Q8TF72), TREX2 |
| | (Q9BQ50), SPATA7 (Q9P0W8) |

[0902] The methods above were further repeated to identify proteins that were identified in cancer samples using pull-down with the L1 library. Proteins identified in these experiments include MUC5B (Q9HC84), FABP5 (Q01469), HPX (P02790), CP (P00450), SPRR2E (P22531), SPRR2D (P22532), PDE4D (Q08499-7), GC (P02774-2), CPD (075976), CD14 (P08571), LAP3 (P28838-2), AFM (P43652), FCN2 (Q15485-2), DMBT1 (Q9UGM3-9), LIFR (P42702), SNX27 (Q96L92-3), LCN1 (P31025), ARFIP1 (P53367-2), APOH (P02749), KLKB1 (P03952), XP32 (Q5T750), H2AFV (Q71UI9-5), KRT75 (095678), KRT6C (P48668), KRT83 (P78385), KRT76 (Q01546), KRT33B (Q14525), KRT72 (Q14CN4-3), KRT31 (Q15323), KRT73 (Q86Y46-2), DSG1 (Q02413-2), LCE1C (Q5T751), LCE1A (Q5T7P2), CFB (P00751), CFH (P08603), SERPINA1 (P01009-2), Ig kappa chain V-I region EU (P01598), Ig kappa chain V-II region MIL (P01616), Ig lambda chain V-IV region Bau (P01715), Ig heavy chain V-III region GAL (P01781), IGLC6 (POCF74) and ACTG2 (P63267-2). Accession numbers in parentheses are from the UniProt database (www.uniprot.org).

[0903] The biomarkers in this Example can be used to detect microvesicles that are indicative of cancer or non-cancer samples.

### Example 24: Identification of Biomarkers Through Affinity Enrichment with an Enriched Oligonucleotide Library and Mass Spectrometry

[0904] This Example continues upon the Example above. Identification of protein-protein and nucleic acid-protein complexes by affinity purification mass spectrometry (AP-MS) can be hampered in samples comprising complex mixtures of biological components (e.g., bodily fluids including without limitation blood and derivatives thereof). For example, it may be desirable to detect low abundance protein and nucleic acid-protein complexes in a complex milieu comprising various components that may interact promiscuously with specific binding sites such as high abundance proteins that interact non-specifically with the affinity resin. AP-MS has been used previously to enrich for pre-identified targets of interest using individual DNA or RNA aptamers or specific nucleic acid binding domains. In this Example, an enriched oligonucleotide probing library was used as the affinity reagent. This approach combined with mass spectrometry enables the identification of differentially expressed biomarker from different disease states or cellular perturbations without relying on a priori knowledge of the targets of interest. Such biomarker may comprise proteins, nucleic acids, miRNA, mRNA, carbohydrates, lipid targets, combinations thereof, or other components in a biological system.

[0905] The method comprises identification of an enriched oligonucleotide probe library according to the methods of the invention followed by target identification with affinity purification of the bound probing library and mass spectrometry. The members of the enriched oligonucleotide probing library comprise an affinity tag. A biological sample is probed with the oligonucleotide probe library, affinity purification of the oligonucleotide probe library via the affinity tag is performed which will accordingly purify biological entities in complex with various members of the probe library, and read-out of targets that purified with the members of the probe library is performed using liquid chromatography-tandem mass spectrometry (LC-MS/MS) for proteins or oligonucleotide targets (e.g., miRNA or mRNA) with next generation sequencing (NGS). Confirmation of protein targets is performed using quantitative mass spectrometry (MS), e.g., using MRMISRM or SWATH based methods.

[0906] The method of the Example lends itself to various options. For example, any appropriate affinity tags can be used for affinity pull-down, including without limitation anti-sense oligonucleotides, biotin, polyhistidine, FLAG octapeptide (i.e., N-DYKDDDDK-C(SEQ ID NO. 134), where N stands for Amino-terminus and C stands for Carboxy terminus), 3×FLAG, Human influenza hemagglutinin (HA)-tag (i.e., N-YPYDVPDYA-C(SEQ ID NO. 135)), myc-tag (N-EQKLISEEDL-C(SEQ ID NO. 136)), other such as known in the art, and combinations thereof. Similarly, any appropriate enrichment support can be used in addition to the magnetic streptavidin beads exemplified herein, including without limitation other bead systems, agarose beads, planar arrays or column chromatography supports. It follows that the various supports can be coupled with the various affinity reagents appropriate for the oligonucleotide library, including without limitation streptavidin, avidin, anti-His tag antibodies, nickel, and the like. The different affinity tags and supports can be combined as desired. This Example used cross-linking but in certain cases such cross-linking is not necessary and may even be undesirable, e.g., to favor identification of high affinity complex formation. When cross-linking is desired, any appropriate cross-linkers can be used to carry out the invention, including BS2G, DSS, formaldehyde, and the like. Other appropriate cross-linkers and methods are described herein. See, e.g., Section “Aptamer Target Identification.” Lysis buffers and wash stringencies can be varied, e.g, depending on whether complexes are cross-linked or not. Less stringent lysis/wash conditions may produce a wider array of potential protein complexes of interest whereas more stringent lysis/wash conditions may favor higher affinity oligo-target complexes and/or targets comprising specific proteins (e.g., by disassociating larger complexes bound to the oligos). One of skill will further appreciate that qualitative and/or quantitative LC-MS/MS may be used for target detection and verification. Similarly, metabolic labeling and label-free approaches may be used for quantitative MS, including without limitation spectral counting, SILAC, dimethyl labeling, TMT labeling, Targeted MS with SRM/MRM or SWATH, and the like.

### REFERENCES

[0907] Vickenborg et al. “Aptamer based affinity labeling of proteins”, Angew Chem Int. 51(36):9176-80 (2012).
[0908] Tacheny, M, Arnould, T., Renard, A. “Mass spectrometry-based identification of proteins interacting with nucleic acids”, Journal of Proteomics 94; 89-109 (2013).
[0909] Faoro C and Ataide S F. “Ribonomic approaches to study the RNA-binding proteome.”, FEBS Lett. 588(20):3649-64 (2014).
[0910] Budayeva H G, Cristea, I M, “A mass spectrometry view of stable and transient protein inteeractions.” Adv Exp Med Biol. 806:263-82 (2014).

### Example 25: Protocol for Affinity Capture Using Oligonucleotide Probing Library

[0911] This Example presents a detailed protocol for the method of affinity capture using an oligonucleotide probing library presented in the Example above.

[0912] Protocol:

[0913] The oligonucleotide probe library comprises F-TRin-35n-B-8-3s described herein either desthiobiotin labeled or unlabeled library and binding to normal (i.e., non-cancer) female plasma. The oligonucleotide probe library is enriched against the plasma samples as described elsewhere (e.g., in Example 21). The plasma samples are processed separately against the desthiobiotin labeled or unlabeled oligonucleotide libraries. General parameters included the following:

[0914] 48 normal plasma samples are pooled for enrichment of each oligonucleotide library (Desthiobiotin or Unlabeled)

[0915] 200 μl input plasma per sample

[0916] Ultracentrifugation (UC) is used to pre-clear the samples

[0917] 5 ng of each aptamer library is added to each sample

[0918] Binding competitors for all library samples include 0.01×S1 (dextran sulfate), 340 ng for tRNA and 340 ng Salmon sperm DNA as described elsewhere herein

[0919] 6% PEG 8000 is used for precipitation of microvesicles within the samples

[0920] Affinity purification is performed with C1 Streptavidin beads (MyOne Streptavidin Beads C1-65001, lot 2 ml (10 mg/ml))

[0921] Buffers:

[0922] Plasma dilution: 6 mM MgCl2 in 2×PBS

[0923] Pellet Wash Buffer: 1×PBS, 3 mM MgCl2

[0924] PEG Ppt Buffer: 20% Peg8000 in 1×PBS, 3 mM MgCl2

[0925] Bead Prep Buffer: 1×PBS containing 0.01% Triton X-100

[0926] Lysis Buffer: prepare a 2× stock solution consisting of 100 mM Tris-HCl, 20 mM MgCl2, 400 mM NaCl, 1% Triton X-100, 10% glycerol, pH 7.5. Diluted to 1× with water 1:1 prior to using.

[0927] AP Wash buffer 1: 10 mM Tris-HCl, 1 mM EDTA, 2M NaCl, 1% Triton X-100, pH 7.5

[0928] AP wash buffer 2: 10 mM Tris-HCL, 1 mM EDTA, 2M NaCl, 0.01% Triton X-100, pH 7.5

[0929] Biotin Elution buffer 1: 5 mM Biotin, 20 mM Tris, 50 mM NaCl, pH 7.5

[0930] 1×LDS, 1× Reducing buffer 2

[0931] Reagent/Instrument Prep:

[0932] Pre-chill Ultracentrifuge to 4° C.

[0933] Protease inhibition: dissolve 2 tablets of “cOmplete ULTRA MINI EDTA-free EASYpack” protease inhibitor in 1100 μl of H2O (20× stock of protease inhibitor).

[0934] Plasma Preparation (for Each of Desthiobiotin or Unlabeled Oligonucleotide Libraries):

[0935] 1. Add 50 μl of protease inhibitor to each ml of sample (on top of frozen plasma) in a room temperature (RT) water bath. Will use 22 mls of pooled plasma, so 1100 μl inhibitor.

[0936] 2. To remove cell/debris, spin samples at 7500×g 20 min, 4° C. in the Ultracentrifuge.

[0937] 3. Collect the supernatant, pool and measure volume & record

[0938] 4. Add an equal volume of 2×PBS, 6 mM MgCl₂ to the plasma.

[0939] 5. Label low-retention eppendorf tubes 1-96.

[0940] 6. Transfer 400 μl of each sample to eppendorf tubes based on appropriate tube map

[0941] 7. Using an electronic P200, add competitors: 8.6 μl of 40 ng/μl Salmon sperm DNA; 8.6 μl of 40 ng/μl tRNA; 8.6 μl of 0.5×S1.

[0942] 8. Incubate at RT with end over end rotation for 10 min.

[0943] 9. Add 10 μL of appropriate oligo library, mix well. Save any leftover diluted library for gel control (see below).

[0944] 10. Incubate 1 hr at RT with end over end rotation.

[0945] 11. Using an electronic repeat P100, add 187p of 20% PEG 8000 to sample for a final 6% concentration to the 435.5 μl of sample/oligo library. Invert a few times to mix and incubate for 15 min at 4° C.

[0946] 12. Spin each sample in table top centrifuge at 10,000×g for 5 min.

[0947] 13. Remove supernatant and discard, add 1 ml 1×PBS, 3 mM MgCl₂ to pellet.

[0948] 14. Wash pellet by gentle inversion

[0949] 15. Remove buffer, re-suspend pellets in 100 μl 1×PBS, 3 mM MgCl₂: incubate at RT for 10 min on mixmate @ 900 rpm to re-suspend. Make sure each sample is well re-suspended by pipetting.

[0950] 16. Pool all desthiobiotin library samples into one 50 ml falcon tube, and the unlabeled library into another, total volume for each should be 4800 μl.

[0951] 17. Take 10 μL aliquot for the input into AP sample for gel (add 10 μL of 2×LDS buffer w/2× reducing agent.

[0952] Affinity Purification:

[0953] 18. Prepare 10 μL of MyOne Strep-coated Magnetic beads per each condition into a 1.5 ml eppendorf tube and place on a magnetic bead rack. Have a Bead only control as well (n=3)

[0954] 19. Remove supernatant and wash 1×500 μl with Bead buffer.

[0955] 20. Discard supernatant

[0956] 21. Resuspend beads in an equal volume of 1×PBS, 3 mM MgCl₂ (equal vol to what was taken out originally=10 μl)

[0957] 22. Add the 10 μl of beads directly to the 4780 μL from step 19. To Bead only control add PBS.

[0958] 23. Incubate samples with streptavidin beads 1 hr RT on plate shaker (taped).

[0959] 24. Place on the large magnetic stand for 1 min and remove supernatant

[0960] 25. Add 1.5 mL of 1× lysis buffer to the samples (do 3×500 μl with a good rinse of the 50 mL falcon tube for each to collect all the beads) and transfer to a new set of eppendorf tubes.

[0961] 26. Incubate for 20 min on ice.

[0962] 27. Place tubes in magnetic bead rack, let equilibrate 1 min and remove the supernatant.

[0963] 28. Wash the beads with wash buffer #1 via vortexing. Resuspend well.

[0964] 29. Place tubes on magnetic bead rack, let equilibrate 1 min and remove the supernatant

[0965] 30. Wash 2 additional times as with wash buffer #1 steps 27-29 (total 3 washes with wash buffer #1)

[0966] 31. Repeat steps 27-29 (2) additional times with wash buffer #2

[0967] 32. During the last wash transfer beads to a new eppendorf tube. (to reduce non-specific binding)

[0968] 33. Do one dry spin to make sure all residual wash buffer is removed.

[0969] 34. Add 10 μl of Biotin Elution buffer 1 to beads

[0970] 35. Incubate for 15 minutes at 37° C.

[0971] 36. Place on magnetic stand for 1 min, collect sup and transfer to a new tube, add 10 μL of 2×LDS, 2× Reducing agent to eluted sample. Save as Elution #1.

[0972] 37. Add 10 μl of 1×LDS Sample Buffer, 1× Reducing buffer to magnetic beads.

[0973] 38. Boil the samples for 15 min at 90° C. The boiling time is 15 minutes to assure the streptavidin on the beads unfolds and releases the biotinylated aptamer-protein complex.

[0974] 39. Place samples on magnetic stand on ice and collect the eluted sample. This is Elution #2. Discard the beads.

[0975] 40. Gel 1 layout:

[0976] Lane 1: 5 ng Desthiobiotin library

[0977] Lane 2: 1×LDS

[0978] Lane 3: Marker

[0979] Lane 4: Desthiobiotin Elution #1

[0980] Lane 5: Unlabeled Elution #1

[0981] Lane 6: Bead only Elution #1

[0982] Lane 7: Desthiobiotin Elution #2

[0983] Lane 8: Unlabeled Elution #2

[0984] Lane 9: Bead only Elution #2

[0985] Lane 10: Input for AP (saved from step 17)

[0986] Running Reducing SDS Gel:

[0987] Prepare 1×MOPS SDS Running Buffer from 20×MOPS SDS Buffer

[0988] Use 10 or 12 well 4-12% Bis Tris gel

[0989] Peel off tape seal and place in the gel box. Insert spacer for second gel cassette if needed

[0990] Fill the inside/upper chamber with running buffer MOPS (1×) and 500 ul Antioxidant

[0991] Remove the comb carefully, not disturbing the wells

[0992] Rinse the wells with the running buffer to remove the storage buffer which can interfere with sample running

[0993] Slowly load samples to each well carefully using L-20 tip

[0994] Fill the outer/lower chamber with approximately 600 ml of running buffer MOPS (1×)

[0995] Place top portion of unit and secure correct electrodes

[0996] Run the gel to migrate proteins

[0997] 100 V constant for samples to move through stack (until all samples line up) for 15 min

[0998] Increase to 150 V constant for running (until visible sample buffer comes to bottom) for ˜1 hr

[0999] At the end of the run, stop the power supply and remove the gel cassettes from cell

[1000] Disassemble the gel cassette by with gel knife.

[1001] Remove one side of cassette case. Trim off the gel foot and wells (avoid drying gel).

[1002] Transfer gel into container filled with Mili Q water and perform a quick wash.

[1003] Silver Staining:

[1004] Materials:

[1005] ProteoSilver™ Silver Stain Kit, Sigma Catalog No. PROT-SIL1, Lot No. SLBJ0252V

[1006] Ethanol, Fisher Scientific Catalog No. BP2818-4, Lot No. 142224

[1007] Acetic acid, Acros organics Catalog No. 14893-0025, Lot No. B0520036

[1008] Water, Sigma Catalog No. W4502, Lot No. RNBD1581

[1009] Preparation:

[1010] 1. Fixing solution. Add 50 ml of ethanol and 10 ml of acetic acid to 40 ml of ultrapure water.

[1011] 2. 30% Ethanol solution. Add 30 ml of ethanol to 70 ml of ultrapure water.

[1012] 3. Sensitizer solution. Add 1 ml of ProteoSilver Sensitizer to 99 ml of ultrapure water. The prepared solution should be used within 2 hours. A precipitate may form in the ProteoSilver Sensitizer. This precipitate will not affect the performance of the solution. Simply allow the precipitate to settle and remove 1 ml of the supernatant.

[1013] 4. Silver solution. Add 1 ml of ProteoSilver Silver Solution to 99 ml of ultrapure water. The prepared solution should be used within 2 hours.

[1014] 5. Developer solution. Add 5 ml ProteoSilver Developer 1 and 0.1 ml ProteoSilver Developer 2 to 95 ml of ultrapure water. The developer solution should be prepared immediately (<20 minutes) before use.

[1015] 6. All steps should be carried out in the hood and waste needs to be collected in toxic designated container.

[1016] Procedure

[1017] A. Direct Silver Staining

[1018] All steps are carried out at room temperature on an orbital shaker at 60 to 70 rpm.

[1019] 1. Fixing—After electrophoresis of the proteins in the mini polyacrylamide gel, place the gel into a clean tray with 100 ml of the Fixing solution overnight in the hood. Cover tightly.

[1020] 2. Ethanol wash—Decant the Fixing solution and wash the gel for 10 minutes with 100 ml of the 30% Ethanol solution.

[1021] 3. Water wash—Decant the 30% Ethanol solution and wash the gel for 10 minutes with 200 ml of ultrapure water.

[1022] 4. Sensitization—Decant the water and incubate the gel for 10 minutes with 100 ml of the Sensitizer solution.

[1023] 5. Water wash—Decant the Sensitizer solution and wash the gel twice, each time for 10 minutes with 200 ml of ultrapure water.

[1024] 7. Silver equilibration—Decant the water and equilibrate the gel for 10 minutes with 100 ml of the Silver solution.

[1025] 8. Water wash—Decant the Silver solution and wash the gel for 1 to 1.5 minutes with 200 ml of ultrapure water.

[1026] 9. Gel development—Decant the water and develop the gel with 100 ml of the Developer solution. Development times of 3 to 7 minutes are sufficient to produce the desired staining intensity for most gels. Development times as long as 10 to 12 minutes may be required to detect bands or spots with very low protein concentrations (0.1 ng/mm2).

[1027] 10. Stop—Add 5 ml of the ProteoSilver Stop Solution to the developer solution to stop the developing reaction and incubate for 5 minutes. Bubbles of CO₂ gas will form in the mixture.

[1028] 11. Storage—Decant the Developer/Stop solution and wash the gel for 15 minutes with 200 ml of ultrapure water. Store the gel in fresh, ultrapure water and take picture for documentation.

[1029] Protein Identification

[1030] Protein bands of interest were excised from the gradient gels and subjected to liquid chromatography-tandem mass spectrometry (LC-MS/MS) as above.

### Example 26: Oligonucleotide Probes: Breast Cancer Versus Non-Cancer

[1031] This Example presents breast cancer oligonucleotide probes identified in a library enriched against balanced fractions pool of plasma-derived microvesicles from patients with 50% aggressive cancer. General methodology is as presented in Example 21 above. The samples comprised pools of 30 each of breast cancer patient plasma and healthy plasma (i.e., non-cancer controls). A set of cancer specific aptamers was identified where each aptamer has a fold change exceeding two when compared to either the healthy plasma pool (normal and non-cancer) or process control (no negative selection enriched library).

[1032] Methodology

[1033] The F-TRin-35n-B 8-3s library as described herein was enriched against microvesicles from the plasma samples. See Example 21 with the modifications noted below. The screened library comprised a 5′ region (5′ CTAGCATGACTGCAGTACGT 3′ (SEQ ID NO. 131)) followed by the random naïve aptamer sequences and a 3′ region (5′ CTGTCTCTTATACACATCTGACGCTGCCGACGA (SEQ ID NO. 132)). In the previous enrichment protocol in Example 21, positive, negative and positive selections were performed before each cycle of PCR to re-amplify the library. But in the current enrichment protocol, the aptamer library was purified with streptavidin beads after each selection and the beads were directly used for PCR amplification. Also as compared to prior experiments, the new sample pool for aptamer enrichment was balanced for different plasma fractions and collection vial for each of cancer, non-cancer and normal patients. Specifically, plasma was initially collected in 4 tubes from each patient, each of those 4 tubes were split into 3 aliquots, resulting in 12 aliquots from each patient. For example, a 1st tube out of the 4 results in aliquots 1A, 1B and 1C, the same split is repeated for the other three aliquots, which results in 12 aliquots from each patient (1A-C, 2A-C, 3A-C, 4A-C). Correspondingly, a pool of 60 patients consists of each variant repeated 5 times (5×12). Enrichment was done according to the selection methodology outlined above, where the library was PCR amplified after each binding round for 7 rounds, which include 3 positive selections against cancer-derived samples, 3 negative selections against controls, and a final positive selection. The enriched library was subjected to the probing test on cancer and healthy pools of plasma samples. There was a subset of 296 cancer specific aptamers, which have a relatively higher read count and fold change >2 as compared to healthy pool and process control. The detailed protocol is as follows:

[1034] Equipment & Supplies

[1035] 1×PBS (HiClone): SH30256.01, Lot #: AZC186921, bottle#1476, exp. May 2016. Supplemented with 3 mM MgCl₂ (4227844, USB) in steps 6, 7, 11.

[1036] Table Top centrifuge: 0363

[1037] 20×SI: Aptamer Science TT 070214, LN: 14F-01-S1, exp. 2015 June

[1038] PEG8000-lot #SLBJ9928V cat #91458, protease inhibitor Ref-05892791, Water—ref 10977-015, lot #1606173

[1039] 2×PBS+6 mM MgCl₂-PBS (Sigma)-SLBK2636V, Water-RNBD2918, MgCl₂-4227844 (USB). Used in steps: 5, 9.

[1040] Stock yeast tRNA (Ambion)—lot #1406019. Salmon DNA (Invitrogen)—lot #1617974

[1041] Starting solution comprises 5 ng Non-Enriched F-Trin-35n-B aptamer library, 300 ul of plasma, 0.01×S1+0.8 ng/ul Salmon DNA/tRNA (competitor DNAs), 6% PEG8000 (to precipitate microvesicles); final volume 600 ul.

[1042] Round 1 (1st positive enrichment)

[1043] Step 1: Pre-chill tabletop centrifuge at 4° C.

[1044] Step 2: Protease inhibition: dissolve 1 tablet of “cOmplete ULTRA MINI EDTA-free EASYpack” protease inhibitor in 550 ul of H2O (20× stock of protease inhibitor).

[1045] Step 3: Add 50 ul of protease inhibitor to the sample (on top of frozen plasma) and start thawing: 1 ml total ea.

[1046] Step 4: Cell spin: To remove cells/debris, spin samples at 10,000×g, 20 min, 4° C. Collect the entire volume of supernatant (SN) without disturbing the pellet.

[1047] Step 5: Mix SN from step 4 with equal volume of 2×PBS 6 mM MgCl₂, collect 600 ul ea into 2 ml Fisher Low binding tubes for use in step 6. Store remaining sample at 4° C. for the following rounds.

[1048] Step 6: Blocking: Add competitors in order: 1) Salmon DNA Stock; 2) tRNA; 3) S1. Make dilutions to desired concentration (see starting solution above) in 1×PBS, 3 mM MgCl2, mix well. Incubate for 10 min at room temperature (RT), end-over-end rotation.

[1049] Step 7: Binding: Add ssDNA Probing library to the final concentration 12.5 pg/ul for binding. Make dilutions in 1×PBS, 3 mM MgCl₂.

[1050] Step 8: Precipitation: Add buffer (20% PEG8000 in 1×PBS with 3 mM MgCl₂) to sample to the final PEG concentration 6%.

[1051] Step 9: Spin at 10,000×g for 5 min, RT.

[1052] Step 10: Wash: Remove SN, add 1 ml 1×PBS, 3 mM MgCl2 and wash pellet by gentle inversion with 1 ml aptamer buffer.

[1053] Step 11: Resuspension: Remove buffer, Re-suspend pellets in 200 ul H2O: incubate at RT for 10 min on mixmate 900 rpm. Ensure each sample is re-suspended by pipeting after step 11.

[1054] Step 12: Purification: Aptamers elution from PEG/Protein pellet with Streptavidin beads (Dynabeads #65001: Dynabeads® MyOne™ Streptavidin C1):
[1055] Beads stock: 10 mg/ml; Capacity: >2,500 pmoles/mg;
[1056] 10 ul beads should bind 250 pmoles Biotin
[1057] 3 ul beads for each aptamer library (AL) sample can bind 75 pmoles Biotin

[1058] Library input in the protocol above is ˜5 ng, which is 0.17 pmol

[1059] 12.1) Pre-washing Streptavidin Magnetic Beads:

[1060] 12.1.1 Add 10 uL of Streptavidin Magnetic Beads into 1.5 mL microcentrifuge tube (3 ul×2 samples+overage)

[1061] 12.1.2 Place the tube into a magnetic stand to collect the beads against the side of the tube. Remove and discard the supernatant.

[1062] 12.1.3 Add 0.5 mL of Wash Buffer (1×PBS with 0.1% Tween 20) to the tube. Invert the tube several times or vortex gently to mix. Collect the beads with a magnetic stand, then remove and discard the supernatant.

[1063] 12.1.4 Wash once with 0.5 ml 1×PBS, collect the beads with a magnetic stand, then remove and discard the supernatant.

[1064] 12.1.5 Add 35 ul 1×PBS to tubes. Aliquot into 10 ul per well (using repeater pipet) in 1.5 ml Fisher low-binding tubes. Add 40 ul of 1×PBS.

[1065] 12.2) Incubate 100 ul of sample, recovered in step 12, at 50° C. for 10 min (mixmate, 500 rpm) (to denature/remove protein/PEG from aptamer library)

[1066] 12.3) Sample Binding:

[1067] 12.3.6 Add heat denatured samples to beads (aliquoted in step 5).

[1068] 12.3.7 Incubate for 30 min, 37° C., mixmate at 800 rpm. Spin down at 2000 rpm for 20 sec.

[1069] 12.3.8 Collect the beads (with bound aptamers) using magnet and remove the supernatant by multichanel pipet.

[1070] 12.3.9 Take tubes off the magnet, add 300 ul of 1×PBS, pipet well. Collect the beads with magnetic stand, then remove supernatant.

[1071] 12.3.10 Add 100 ul H2O to resuspend beads by multichanel pipet.

[1072] 12.3.11 Block the beads with Biotin: add 7.5 ul from 10 uM stock, incubate 15 min, RT, 800 rpm.

[1073] 12.3.12 Collect the beads (with bound aptamers) using magnet and remove the supernatant by multichanel pipet. Take tubes off the magnet, add 200 ul of 1×PBS, pipet well. Collect the beads with magnetic stand, then remove supernatant.

[1074] 12.3.13 Add 100 ul H2O

[1075] Step 13: Use beads with bound aptamer library directly in re-AMP PCR (3×33 ul)

[1076] Step 14: Agarose gel

[1077] SYBR Gold gel lot #: H204044-01

[1078] 2 ul of sample+8 ul of loading buffer. Run for 10 cycles

[1079] If no dsDNA bands appear, run additional 3 cycles

[1080] Optional: if PCR product has non-specific bands, perform gel cut.

[1081] Step 15: dsDNA purification with Nucleospin column (NTI binding buffer):

[1082] 2× volume of buffer NTI per sample volume (600 ul NTI to 300 ul sample)
[1083] combine 3 wells per column
[1084] 5 min elution in 30 ul NE buffer, RT. Add 20 ul of NE after elution.

[1085] Step 16: Optional: Gel, SybrGold, Agarose: to verify product with correct size is observed

[1086] Step 17: Quantify dsDNA (QuBit, Life Technologies) (keep 5 ul of dsDNA as control for gel later)

[1087] Step 18: Lambda digestion at 37 C for 2 h; heat inactivation at 80 C for 10 min.

[1088] Step 19: ssDNA purification with Nucleospin column (NTC binding buffer).
[1089] combine 3 samples per column
[1090] elution: 5 min in 30 ul NE buffer, RT

[1091] Step 20: Quantify dsDNA (QuBit, Life Technologies) ssDNA (5 ul)

[1092] Step 21: Gel ssDNA: load between 2 ng and 10 ng

[1093] Round 2 (2d positive enrichment)

[1094] Repeat protocol starting from step 6 above, using diluted plasma samples stored in step 5. All steps are the same except for step 7. Input of library is 5 times less

[1095] Step 7: Binding: Add ssDNA Probing library to the final concentration 2.5 pg/ul for binding. Make dilutions in 1×PBS, 3 mM MgCl2.

[1096] Steps 6-13: As above. Use entire 100 ul of re-suspended sample to re-amplify via PCR

[1097] Steps 14-20: ssDNA preparation as above.

[1098] Round 3 (3rd positive enrichment)

[1099] Repeat steps as shown for round 2

[1100] Round 4 (Negative enrichment)

[1101] Make sure to use correct negative samples (e.g., non-cancer sample in the case of positive cancer selection above, or vice versa)

[1102] Steps 1-9: Repeat as in Round 2 above (ssDNA input is 2.5 pg/ul).

[1103] Step 10: Collect SN (˜900 ul) and discard pellet after PEG precipitation.

[1104] Step 11: Resuspention: Not needed in this step

[1105] Step 12: Purification: Aptamers elution from PEG/Protein pellet with Streptavidin beads (Dynabeads #65001: Dynabeads® MyOne™ Streptavidin C1):
[1106] Beads stock: 10 mg/ml; Capacity: >2,500 pmoles/mg;
[1107] 10 ul beads should bind 250 pmoles Biotin
[1108] 3 ul beads for each AL sample can bind 75 pmoles Biotin

[1109] Library input in the protocol above is ˜5 ng, which is 0.17 pmol
[1110] CHANGE FOR SN->For each sample, split 900 ul SN collected in step 10 above into two aliquots 450 ul ea, consider 3 ul of beads per each aliquot.

[1111] 12.1) Pre-washing Streptavidin Magnetic Beads:

[1112] 12.1.1 Add 30 uL of Streptavidin Magnetic Beads into 1.5 mL microcentrifuge tube. Four samples make 8 aliquots (for beads treatment)×3 ul beads+overage.

[1113] 12.1.2 Place the tube into a magnetic stand to collect the beads against the side of the tube. Remove and discard the supernatant.

[1114] 12.1.3 Add 0.5 mL of Wash Buffer (1×PBS with 0.1% Tween 20) to the tube. Invert the tube several times or vortex gently to mix. Collect the beads with a magnetic stand, then remove and discard the supernatant.

[1115] 12.1.4 Wash 1 time with 0.5 ml 1×PBS, collect the beads with a magnetic stand, then remove and discard the supernatant.

[1116] 12.1.5 Add 105 ul 1×PBS to tubes. Aliquot into 10 ul per well (using repeater pipet) in 1.5 ml Fisher low-binding tubes. Add 40 ul of 1×PBS.

[1117] 12.2) Incubate 900 ul of sample, recovered in step 10, at 50° C. for 10 min (mixmate, 500 rpm) (to denature/remove protein/PEG from aptamer library)

[1118] 12.3) Sample Binding:

[1119] 12.3.6 Add ½ (450 ul) heat denatured samples to beads (aliquoted in step 5).

[1120] 12.3.7 Incubate for 30 min, 37° C., end-over-end rotation. Spin down at 2000 rpm for 20 sec.

[1121] 12.3.8 Collect the beads (with bound aptamers) using magnet and remove the supernatant by multichanel pipet.

[1122] 12.3.9 Take tubes off the magnet, add 300 ul of 1×PBS, pipet well. Collect the beads with magnetic stand, then remove supernatant.

[1123] 12.3.10 Add 100 ul H2O to resuspend beads by multichanel pipet.

[1124] 12.3.11 Block the beads with Biotin: add 7.5 ul from 10 uM stock, incubate 15 min, RT, 800 rpm.

[1125] 12.3.12 Collect the beads (with bound aptamers) using magnet and remove the supernatant by multichanel pipet. Take tubes off the magnet, add 200 ul of 1×PBS, pipet well. Collect the beads with magnetic stand, then remove supernatant.

[1126] 12.3.13 Add 100 ul H2O per purification sample (total 200 ul per negative enrichment sample)

[1127] 12.3.14 Split each sample into 3 aliquots (33 ul each), this results into 6 wells per enrichment sample.

[1128] Step 13: Perform PCR

[1129] Rounds 5, 6: same as round 4

[1130] Round 7: repeats steps as shown for round 2

[1131] Results

[1132] FIGS. 14A-B are scatter plots showing high correlation of frequencies between replicates of cancer pool (FIG. 14A) and appearance of cancer specific subset of aptamers when cancer and healthy pools are compared (circled region in FIG. 14B). FIGS. 14C-F are scatter plots showing the appearance of cancer specific subset of aptamers when the cancer pool profile of the enriched library (i.e., C-RN7) was compared to the cancer pool of the process control library (CP; FIG. 14C) and healthy pool profile of process control library (HP; FIG. 14D). We did not observe a similar subset when the healthy pool profile (C-RN7 v HP) of the enriched library was compared to both variants of profile of process control (FIGS. 14E-F, see points along x-axis).

[1133] Selections of aptamer sequences identified in the enrichment screening are shown in Tables 27-29. In these tables, each complete aptamer sequence is assembled from 5′ to 3′ as a 5′ region, the variable region, and 3′ region. The sequences are shown 5′ to 3′ from left to right, wherein each complete sequence consists of a 5′ leader sequence 5′-CTAGCATGACTGCAGTACGT (SEQ ID NO. 131) followed by the indicated Variable Region sequence followed by the 3′ tail sequence 5′-CTGTCTCTTATACACATCTGACGCTGCCGACGA (SEQ ID NO. 132). The top 50 cancer specific sequences are shown in Table 27, each having a relatively high copy number in these experiments and a cancer/normal copy number ratio of at least 2-fold higher in the cancers. Table 28 comprises 25 sequences with mid-level copy number and a cancer/normal copy number difference of 0.8-1.2-fold. Table 29 shows a selection of 25 more sequences with low copy numbers and cancer/normal copy number ratio of ˜1.0 (i.e., no significant difference).

TABLE 27
Cancer-Specific Sequences

| SEQ ID NO. | Variable Region |
|---|---|
| 137 | AACCCGCGTGATTGGGGTACTGCCCATGCGACTTT |
| 138 | AACTGAAGGCCAATTAAACTCCACTGTGCTAATCT |
| 139 | ACATGCCGGCGTTGATACTCTACTGTGCTCCATTATGA |
| 140 | AGACATGCCACGCCCTTTACATACTCCACTGTGCCA |
| 141 | AGCCACGCAGACCTATCTCTACTGTGCCAATGTT |
| 142 | AGGTACGTAAGGCTGCCATTACTCTCTACTGTGCCGA |
| 143 | AGTCTAGCGATCGACTTTTCTCTACGGTGCCCTTC |
| 144 | AGTGTGCGCATGAATCCATTACTCCACTGTGCCTTGA |
| 145 | AGTTGCAGACCCTTGTATTCTCTACCGTGCCCTATGA |
| 146 | CACTGCTAACTGATATTGTTGAACTCCACCGTGC |
| 147 | CATGCGACAAGCTTCCATTAACCATCCGCTATTTATGA |
| 148 | CATGCGGACCACGCTTTCACAAACTCATGATTCAAA |
| 149 | CATGCGTACGTCCTATTCTCTCTACTGTGCATTAA |
| 150 | CCTGCAATGCGGAAACCCTTCTACTCTACTGTGCC |
| 151 | CGCGAGCCAGGGTACTGCCTGCGGTCTAAACAATCA |
| 152 | CGTGCGACTTGTTCTCTACTGTGCCAATAAACCATA |
| 153 | GATAGCGCATATTCCTCTACTGTGCTACTTGTTAT |
| 154 | GCAAACCAATTAGTGTACCTCTACCGTGCCCAATGA |
| 155 | GCAACTACTCTCTACCGTGCCCAGTGATTTCTCCATGA |
| 156 | GCACCACATGTCAATCTCTACTGTGCTTATCTCATA |
| 157 | GCAGCACAAAAGTTACTCTCCTCTACCGTGCCCCTA |
| 158 | GCAGTTTGCGTGGATACTCTACTGTGCTGACCCTTA |
| 159 | GCATACATGAACTCTACCGTGCCCGTTGACTTGAAA |
| 160 | GCATAGCGGTTCACATTATTTTACTCTACCGTGCC |
| 161 | GCCACAGTATCGTTCTCGAGCTGGTTCCCGCCAT |
| 162 | GCGAACATCACTCTACCGTGCCATCTGAAATGACGTGA |
| 163 | GCGAACTTGTAACTCTACTGTGCTTATATTAAGGTTGA |
| 164 | GCGACCAATACTCTACTGTGCTGATACGGATTTTA |
| 165 | GCGACCACTCTATAACCTCAACCGTGCTCACTCCT |
| 166 | GCGCAAGTTGTCTCTACCGTGCCCCGAAAGTTTTGGA |
| 167 | GCGCACCACCTACATTGTCTCCACCGTGCTTTATT |
| 168 | GCGCACCCACGTGAACTCTACCGTGCCTATTTCCTA |
| 169 | GCGCACCGACCTCTACCGTGCCAAAATAGGTTATCTGA |
| 170 | GCGCCACCACACAAACCTTCCCTATCGAGGGAGAT |
| 171 | GCGCGGACTATATTACTCTACTGTGCCCTGCTTATGA |
| 172 | GCGGATAGGACAATAACTTACTCCACTGTGCCATC |
| 173 | GCGGTGACCTCTACTGTGCGCCCCAAGCCTTAGTT |
| 174 | GCGTACAGAACCTCTACCGTGCCCACTCACTTCCATGA |
| 175 | GCGTCCCCTCCCGGATGGTCCTTTCTCTACTGTGC |
| 176 | GCGTGCTAACGGTATGCAAGACGTATGCGATTTTC |
| 177 | GCTAGACCGATCCACCTCAAACCTCTACTGTGCCT |
| 178 | GCTAGCTTAGCTCTACCGTGCACATTCCGCTATTT |
| 179 | GGTGCAGGCAAGATATTTTACTCTACTGTGCATTT |
| 180 | GTAAATGTACATGCGTATCCTCACCTCTACTGTGC |
| 181 | TAACACGTCTTTCACTCTACTGTGCCCTTTATGCC |
| 182 | TAATGGCATGCGGACCTATCCTCTACCGTGCTCCTTGA |
| 183 | TATGCGATTTCTCTACCGTGCCAATATGCCTTGTT |
| 184 | TCTGCGATTCTACCGTTACTCTACCGTGCCACCAAA |
| 185 | TGCGCAGTCATTTCGCCATGTTCTCTACCGTGCCAA |
| 186 | TGTCAGGCGGTAGTACTCTCCACCGTGCCTATTGTTGA |

TABLE 28
Moderate Control Sequences

| SEQ ID NO. | Variable Region |
|---|---|
| 187 | ACATGCATACCCTACGAATCGTTCCATCACCATAC |
| 188 | AGTCAGTGCGCCCGCTATTTACGATCTCACTGTTC |
| 189 | AGTGCAGTCGCGATGGGAACTTCTTCTTTGCTTTA |
| 190 | ATGGCCATGCGAACCGAAACCTAGCCCATTTTCCTA |
| 191 | ATTGCGGTCATCCCCTTCCACGCTATACCACCAT |
| 192 | CACTGCAGGTCACTGGCGCCCTATTTCCTCACATT |
| 193 | CATGCCCGTAAACGCCTAATCTACCACCTTTTGCT |
| 194 | CATGCCGCCTTTCGACTTCCATATCCCAACACGCC |
| 195 | CATGCCGGTCATTCCATACTCAAACTCATTCACTC |
| 196 | CATGCGAGCTACCCTTATCATCTCATGTTTGCTTT |
| 197 | CATGCGATTGCGCCCCATTCCTTGCCTTATCTCAC |
| 198 | CATGCGCACATCGTACTCCGTAGCCCTAAATTATCA |
| 199 | CATGCGCCCTGTGCGTTCTCTACTACCCTAATCAT |
| 200 | CATGTACGCACACCCACTGATTCTTTACCACCCACTGA |
| 201 | GCAGGACACCCCCTCATTATTTGTTTCATCCTACG |
| 202 | GCATCAGGCGCACTTTCATTTGCTAATCGTTTTTT |
| 203 | GCCATGCGAGAGGGTTATTGTTGATCTCATGGGTT |
| 204 | GCGATAAAGCCCATGTAACCCTCTGAAAACCCGAT |
| 205 | GCGCCACGAGCTACCCGACTTCCGATTACTTTCTT |
| 206 | GCGGACATCGGGCACTTTATACAACCACCTTTTTG |
| 207 | GCTGCAGGCCGTCCCAAATATTCGCTCCCACACATA |
| 208 | GCTGGTCAGGCGTTCCACACTTCCTACCCGCTTTT |
| 209 | TATGCGCAGGACCACCTATTACACGACCTTATCCT |
| 210 | TCAACTGGGGTCAGTGCCAACGCTTACTTTCTTCT |
| 211 | TCAAGCAGTCATAGCCGGTTTCACGCTTTACTTAC |

TABLE 29
Negative Control Sequences

| SEQ ID NO. | Variable Region |
|---|---|
| 212 | AAAACACGCAAACTACCTGGAAACTTGACTTCTTT |
| 213 | AAAACACTCACGATACCTACCCTGGTCTTCACAAC |
| 214 | AAAACAGCAGGCATTTTCCTGTACTTTCGAATTCA |
| 215 | AAAACCACAGCTACCATTATCGCATTGGCCCTACT |
| 216 | AAAACCCAAGCACCGAACGAACTATCCCTTTTTCT |
| 217 | AAAACCCACCACGCGTCGTACGCATACCACCCTTT |
| 218 | AAAACCGGTCCTGCGCCTTCTTCTCCGCTTTTATT |
| 219 | CAGGTACTGTGGCAGGCGATCCATTGCTCTCTTTT |
| 220 | CAGGTCAGCAGTCCAGGCGATTACTTTCTCTTTTC |
| 221 | CAGTAACCGCTGTCTGTCATTTTTCAACATTCTGT |
| 222 | CAGTAACTGTAGTCGTCGAACCTTGCTTACAACCCA |
| 223 | CAGTAAGGAAGCTCATGCGGTACAGGTCTACCTCG |
| 224 | CAGTAAGTGCTGTCACTGCGCCACTTGTAAATACTTGA |
| 225 | CAGTAATGCGAAGCTAGTACGTTCTCTCTTATTTTA |
| 226 | CAGTACAAACATCGCGATTCTTTCCTTGATACTGT |
| 227 | GAGGGCGGCTCTAATGCATGCGCTTTCATCTTTGC |
| 228 | GAGGGCGGGCAGTCATTTCGATTATATCTGCCTACA |
| 229 | GAGGGCGGTCCAACGCGCAATGTCTTTTTTCTTCCGA |
| 230 | GAGGGCGTACAGGAGTCTTGCGGTCCACATTTTAT |
| 231 | GAGGGCTACTGAAGTTAATGGCATTCTTCTCTATC |
| 232 | GAGGGCTCATGCCAGCCGCTTTTCTTACCTTTATC |
| 233 | GAGGGCTGAACAAGTAGTGCGTACATTTTCCTTCCTGA |
| 234 | GAGGGCTGCAGGCATCCAATTTCCTCCTTGTCCCT |
| 235 | GAGGGGCCGTCCTTCGTACGGAATGTGCATGCGCT |
| 236 | GAGGGGCGGTCATTGCCGTTAGCCTCCTTTCGCCT |

[1134] The data described above (i.e., FIGS. 15A-F and Tables 27-29) were obtained with 1 ng input of the specified oligonucleotide libraries used to probe the various samples. In addition, probing experiments were performed with lower titers of the C-R7N oligonucleotide library, specifically 0.1, 0.01, 0.001 and 0.0001 ng. A total of 826 unique oligonucleotide sequences were detected between all titers. An eighth enrichment round (round 8) was performed with four titers of the library C-R7N-1 (i.e., 1 ng input in round 7): 1, 0.1, 0.01 and 0.001 ng input. From each titer, sets of oligonucleotides that passed the same filters described above were obtained. The composite set of oligonucleotides was compared to the sets of oligonucleotides obtained from the titrations of the C-R7N library noted above. The variable regions of 733 oligonucleotides observed in at least two of the five sets of oligonucleotides are listed in rank order by occurrence in SEQ ID NOs. 237-969. These oligonucleotides were identified as oligonucleotide probes that selectively bind to cancer samples. As in Table 27, the oligonucleotides were synthesized with a 5′ region consisting of the sequence (5′-CTAGCATGACTGCAGTACGT (SEQ ID NO. 131)) and a 3′ region consisting of the sequence (5′-CTGTCTCTTATACACATCTGACGCTGCCGACGA (SEQ ID NO. 132)) flanking the variable regions. The 733 cancer specific sequences which can be used to identify cancer samples along with those in Table 27 above.

[1135] As noted, next generation sequencing technologies can be used to identify and quantify members of the oligonucleotide library that bind to a sample. We also designed probes that can be used to identify and quantify members of the oligonucleotide library that bind to a sample without requiring a PCR step. This procedure relies on hybridization of the bound oligonucleotide with oligonucleotide-specific complementary probe. The complementary probe can directly or indirectly carry a tag that can be detected. For example, the oligonucleotide-specific complementary probe may carry a fluorescent tag. A general design is shown in FIG. 14G. In the figure, an individual member of the oligonucleotide library 1401 is bound by complementary probe 1402. Complementary probe 1402 consists of three sections from 5′ to 3′: 1) probe part B 1403; 2) probe complement 1404; and 3) probe part A 1405. The member of the oligonucleotide library 1401 is bound by complementary probe 1402 via base pair hybridization between the variable region of oligonucleotide library 1401 and the probe complement region 1404 of complementary probe 1402. Tag probe 1406 which is fluorescently labeled (indicated by the circles in the figure) and capture probe 1407 hybridize to the probe part A 1405 and probe part B 1403 of complementary probe 1402, respectively. These features allow for the capture of the entire complex (i.e., oligonucleotide library 1401, complementary probe 1402, tag probe 1406, and capture probe 1407) via the capture probe, combined with detection via the label of the tag probe 1406.

[1136] For these experiments, the complementary probes were designed to work with tag probe and capture probe supplied as part of the nCounter nucleic acid detection system from NanoString Technologies, Inc. (Seattle, Wash.). The complementary probes for nCounter quantification were designed as reverse complement to the top 50 oligonucleotide probe binders and 50 negative controls, described above. The complete sequences are shown in Table 30. In the table, the ID column is an identifier and the Type column indicates if the sequence is to a control oligonucleotide probe (“neutral”) or to a cancer binding oligonucleotide probe (“binder”). Each complete sequence comprises from 5′ to 3′: 1) 5′ Region (Probe Part B 1403); 2) Probe Complement Region 1404; and 3) 3′ Region (Probe Part A 1405), where region identification numbers correspond to FIG. 14G. The probe complement region may be shorter than the variable sequence of the corresponding oligonucleotide probe in order to optimize binding parameters (e.g., specificity and melting point). The probe complement region may also be so optimized to bind against the variable sequence of the corresponding oligonucleotide probe and also to at least a portion of its 5′ and 3′ flanking sequences (e.g., as shown in Tables 27-29 above). The oligonucleotides each have a 5′ region 1403 consisting of the sequence (5′-CGAAAGCCATGACCTCCGATCACTC (SEQ ID NO. 970)) 5′ of the Probe Complement Region 1404 and a 3′ region 1405 as shown in Table 30 located 3′ of the Probe Complement Region 1404. Probe Part A 1405 shown in FIG. 14G corresponds to SEQ ID NO. 971.

TABLE 30
Complementary Probe Sequences

| SEQ ID NO | Type | Probe Complement Region 1504 | 3′ Region (Probe Part A 1505) |
|---|---|---|---|
| 972 | neutral | CAAGTTTCCAGGTAGTTTGCGTGTTTTA | CCTCAAGACCTAAGCGACAGCGTG |
| | | CGTAC | ACCTTGTTTCA |
| 973 | neutral | CAGGGTAGGTATCGTGAGTGTTTTACGT | CATCCTCTTCTTTTCTTGGTGTTG |
| | | ACT | AGAAGATGCTC |
| 974 | neutral | GAAAGTACAGGAAAATGCCTGCTGTTTT | CACAATTCTGCGGGTTAGCAGGAA |
| | | ACGTAC | GGTTAGGGAAC |
| 975 | neutral | GAGACAGAGTAGGGCCAATGCGATAATG | CTGTTGAGATTATTGAGCTTCATC |
| | | | ATGACCAGAAG |
| 976 | neutral | GAGACAGAGAAAAAGGGATAGTTCGTTC | CAAAGACGCCTATCTTCCAGTTTG |
| | | GGT | ATCGGGAAACT |
| 977 | neutral | GACGCGTGGTGGGTTTTACGTAC | CGAACCTAACTCCTCGCTACATTC |
| | | | CTATTGTTTTC |
| 978 | neutral | GCGCAGGACCGGTTTTACGTAC | CCAATTTGGTTTTACTCCCCTCGA |
| | | | TTATGCGGAGT |
| 979 | binder | GAGACAGAAAGTCGCATGGGCAGTA | CTTTCGGGTTATATCTATCATTTA |
| | | | CTTGACACCCT |
| 980 | binder | AGTGGAGTTTAATTGGCCTTCAGTTACG | CAACAGCCACTTTTTTTCCAAATT |
| | | TACT | TTGCAAGAGCC |
| 981 | neutral | GAACGATTCGTAGGGTATGCATGTACGT | CACCGTGTGGACGGCAACTCAGAG |
| | | ACT | ATAACGCATAT |
| 982 | binder | AGTATCAACGCCGGCATGTACGTAC | CCTGGAGTTTATGTATTGCCAACG |
| | | | AGTTTGTCTTT |
| 983 | binder | TAAAGGGCGTGGCATGTCTACGTAC | CAGATAAGGTTGTTATTGTGGAGG |
| | | | ATGTTACTACA |
| 984 | binder | GAGACAGAACATTGGCACAGTAGAGATA | CTTCCTTCCTGTGTTCCAGCTACA |
| | | GGT | AACTTAGAAAC |
| 985 | binder | TAATGGCAGCCTTACGTACCTACGTACT | CATAAAATTGGTTTTGCCTTTCAG |
| | | | CAATTCAACTT |
| 986 | neutral | CGGGCGCACTGACTACGTAC | CTGGTCAAGACTTGCATGAGGACC |
| | | | CGCAAATTCCT |
| 987 | binder | GAGACAGGAAGGGCACCGTAGA | CTTTCGTTGGGACGCTTGAAGCGC |
| | | | AAGTAGAAAAC |
| 988 | neutral | CCATCGCGACTGCACTACGTACT | CCAGCAGACCTGCAATATCAAAGT |
| | | | TATAAGCGCGT |
| 989 | binder | GAGACAGTCAAGGCACAGTGGAGTAATG | CCTGCCAATGCACTCGATCTTGTC |
| | | | ATTTTTTTGCG |
| 990 | binder | GGTAGAGAATACAAGGGTCTGCAACTAC | CAAACTGGAGAGAGAAGTGAAGAC |
| | | GTAC | GATTTAACCCA |
| 991 | neutral | CGGTTCGCATGGCCATACGTAC | CGATTGCTGCATTCCGCTCAACGC |
| | | | TTGAGGAAGTA |
| 992 | neutral | GAAGGGGATGACCGCAATACGTACT | CTGAGGCTGTTAAAGCTGTAGCAA |
| | | | CTCTTCCACGA |
| 993 | neutral | CCAGTGACCTGCAGTGACGTACT | CTAGGACGCAAATCACTTGAAGAA |
| | | | GTGAAAGCGAG |
| 994 | binder | TGGAGTTCAACAATATCAGTTAGCAGTG | CCACGCGATGACGTTCGTCAAGAG |
| | | ACGTAC | TCGCATAATCT |
| 995 | neutral | CCTGCCACAGTACCTGACGTACT | CATTTGGAATGATGTGTACTGGGA |
| | | | ATAAGACGACG |
| 996 | neutral | CTGGACTGCTGACCTGACGTACT | CACAAGAATCCCTGCTAGCTGAAG |
| | | | GAGGGTCAAAC |
| 997 | neutral | GAAAAATGACAGACAGCGGTTACTGACG | CTTGACGTAGATTGCTATCAGGTT |
| | | TAC | ACGATGACTGC |
| 998 | neutral | AGGTTCGACGACTACAGTTACTGACGTA | CTTACAGATCGTGTGCTCATGACT |
| | | C | TCCACAGACGT |
| 999 | neutral | CGCATGAGCTTCCTTACTGACGTACT | CTTGGAGGAGTTGATAGTGGTAAA |
| | | | ACAACATTAGC |
| 1000 | neutral | GAGACAGTCAAGTATTTACAAGTGGCGC | CCTACGTATATATCCAAGTGGTTA |
| | | AG | TGTCCGACGGC |
| 1001 | neutral | GAGACAGTAAAATAAGAGAGAACGTACT | CAGCAAGAAGGAGTATGGAACTTA |
| | | AGCTTCGCATTA | TAGCAAGAGAG |
| 1002 | neutral | GGAAAGAATCGCGATGTTTGTACTGACG | CACCCCTCCAAACGCATTCTTATT |
| | | TAC | GGCAAATGGAA |
| 1003 | neutral | GGCGTTTACGGGCATGACGTAC | CCCGAAGCAATACTGTCGTCACTC |
| | | | TGTATGTCCGT |
| 1004 | neutral | GTCGAAAGGCGGCATGACGTAC | CCGGGAATCGGCATTTCGCATTCT |
| | | | TAGGATCTAAA |
| 1005 | neutral | GAGACAGGAGTGAATGAGTTTGAGTATG | CCGATCTTCATAACGGACAAACTG |
| | | GAATGAC | AACGGGCCATT |
| 1006 | binder | GTTAATGGAAGCTTGTCGCATGACGTAC | CGCTATGCAGACGAGCTGGCAGAG |
| | | T | GAGAGAAATCA |
| 1007 | neutral | ATGATAAGGGTAGCTCGCATGACGTACT | CATTCGCAACCATGTGAAGTAATG |
| | | | TGAGCGTACTT |
| 1008 | neutral | GGCGCAATCGCATGACGTACT | CACCAGTTAGCGTGGCGTATACCA |
| | | | TGTTGTTAACA |
| 1009 | neutral | GAGACAGTGATAATTTAGGGCTACGGAG | CCTGAATCAATAGAACAATATCAG |
| | | TACG | TTATGGCGGTG |
| 1010 | neutral | GAGACAGATGATTAGGGTAGTAGAGAAC | CGGTTGTTAATATGACAGGCCGCT |
| | | GCAC | AAAGACGTTCT |
| 1011 | binder | GAGACAGTTTGAATCATGAGTTTGTGAA | CCGTCTCAGATGAGTGGGTTAATC |
| | | AGCGT | AATCAAGTATG |
| 1012 | binder | GAGAGAATAGGACGTACGCATGACGTAC | CTGACACATTAGTAACGTCGGCAA |
| | | T | GCACTTAGTCG |
| 1013 | neutral | TGGGTGTGCGTACATGACGTACT | CGTGAACCAGATTATGTATGGACG |
| | | | CGCAATAGATA |
| 1014 | binder | GGTTCCGCATTGCAGGACGTAC | CATACGAAATTTGAGCAAGCAATT |
| | | | GAAGGCTTAGA |
| 1015 | binder | CCCTGGCTCGCGACGTAC | CTATCAGCTAATAGGGTCGGCTCA |
| | | | ACAGTGTATCC |
| 1016 | binder | CAGTAGAGAACAAGTCGCACGACGTAC | CTATCAATTCGTGACCCCGATCAT |
| | | | CCAGTCCAGAA |
| 1017 | neutral | GAGACAGGCAAAGATGAAAGCGCATG | CTTGAGCTCTAGGCCCAAAACGAC |
| | | | CTTAATGGTCA |
| 1018 | neutral | TGCCCGCCCTCACGTAC | CTAGCCCAGATCCTACGAGATGAG |
| | | | CTACGTAACTA |
| 1019 | neutral | GTTGGACCGCCCTCACGTAC | CAAATGCACTCTATATGGAGGGAG |
| | | | AGTAGCTGGAT |
| 1020 | neutral | ACTCCTGTACGCCCTCACGTAC | CCTGGTCTAGGTATCTAATTCGTG |
| | | | GGTCGGGTACT |
| 1021 | neutral | GCCATTAACTTCAGTAGCCCTCACGTAC | CATTAGCTCGGATGCTATCAGCTT |
| | | | GCGCCTATTAT |
| 1022 | neutral | GAGACAGGATAAAGGTAAGAAAAGCGGC | CACGATCTGTATTTTGCACCTTTC |
| | | TG | GCTATGCTGAG |
| 1023 | neutral | GAGACAGTCAGGAAGGAAAATGTACGCA | CTGTGTCCGTCTATACGCATACTG |
| | | C | GTCCACATATA |
| 1024 | neutral | GAGACAGAGGGACAAGGAGGAAATTGG | CATGTTGGAGTTAACGGAGACCCG |
| | | | CCATCGTTTAC |
| 1025 | neutral | GGACGGCCCCTCACGTAC | CGCTCATTTTGAACATACGATTGC |
| | | | GATTACGGAAA |
| 1026 | neutral | ATGACCGCCCCTCACGTACT | CCTATGCATCATGTGCCTCACTAG |
| | | | GACATCATGCT |
| 1027 | binder | CACAGTAGAGGAATATGCGCTATCACGT | CCTAAATTGGGAAAAAAGGTTTTA |
| | | ACT | GCTATTGATGG |
| 1028 | binder | GAGACAGTCATTGGGCACGGTAGA | CTTCAGTTAAAGGCTATCTTGCTC |
| | | | CGCTCGTTCTC |
| 1029 | binder | GCACGGTAGAGAGTAGTTGCACGTAC | CTTAAAGCTATCCACGAATGTCAA |
| | | | AAATGTGGTTT |
| 1030 | binder | GAGACAGTATGAGATAAGCACAGTAGAG | CCCGAATGTATAATGCTGACGTTC |
| | | ATTGACATGT | TTGCTTTTGGC |
| 1031 | binder | GAGACAGTAGGGGCACGGTAGAG | CCTATTGAAGCAATCCTCTCCCCA |
| | | | ATACTTAAAAA |
| 1032 | neutral | GGGGGTGTCCTGCACGTAC | CTACGGTTACCGTCTTTATAAGTG |
| | | | AACAAAACCGG |
| 1033 | binder | GTAGAGTATCCACGCAAACTGCACGTAC | CTCTGTGAACTGTCATCGGTCCGA |
| | | | TCAATTAGTCT |
| 1034 | binder | GCACGGTAGAGTTCATGTATGCACGTAC | CTCCCCTTTCCCAAGTAAATGTAC |
| | | | GGGAATTATCG |
| 1035 | binder | GAGACAGGGCACGGTAGAGTAAAATAAT | CGCTTTATTATGTGTTCGTCTAAC |
| | | GTGA | TCTGTTTCTGT |
| 1036 | neutral | AAAGTGCGCCTGATGCACGTAC | CCGAGTGCATGAGCTGTCTTTCAC |
| | | | ATGATACATCG |
| 1037 | binder | CTCGAGAACGATACTGTGGCACGTAC | CTATTTCTGTTCACGGATGAAGGC |
| | | | CTATATCAATG |
| 1038 | neutral | CCCTCTCGCATGGCACGTAC | CCATCCACTTTCATGGAAACAATA |
| | | | AGAGCAGGGAA |
| 1039 | binder | GAGACAGTCACGTCATTTCAGATGGCA | CACAAACTCACTACTACCAACAAC |
| | | | CTCACCAAAAA |
| 1040 | binder | GAGACAGTCAACCTTAATATAAGCACAG | CTCATGTCCTCTGTTAATCCAGCC |
| | | TAGAGTTACAAGTTC | TGAATATGCCA |
| 1041 | binder | GCACAGTAGAGTATTGGTCGCACGTAC | CAGAAATGTCACTCCCATGGTGGC |
| | | | TGATATAGAAA |
| 1042 | binder | GAGACAGAGGAGTGAGCACGGTT | CATGTCGAACCTTGGATAGGAGCG |
| | | | ACCGATTACGT |
| 1043 | neutral | GGTTACATGGGCTTTATCGCACGTACT | CTCAGGTTGTTACTTGAAGGGTTC |
| | | | AACACGAGCTC |
| 1044 | binder | GGTAGAGACAACTTGCGCACGTACT | CAGAAGATCAAAAAACGATCCCTG |
| | | | TCCATCAATAC |
| 1045 | binder | GAGACAGAATAAAGCACGGTGGAGACAA | CTTAGGCTACCAAATGAATTTAAA |
| | | TG | GCCAGCTGAAA |
| 1046 | binder | GAGACAGTAGGAAATAGGCACGGTAGAG | CCAATGCTTGCAGTATGTATCCTG |
| | | TT | ATCGTGCGTGC |
| 1047 | binder | AGGTCGGTGCGCACGTAC | CCTGCATTCTCATGGAAATGCAAT |
| | | | GGATTCATTCC |
| 1048 | binder | GTGTGGTGGCGCACGTACT | CCTGTTGCAGTATCACGTAAATAC |
| | | | CTACTTCGATA |
| 1049 | neutral | GAGACAGAAGAAAGTAATCGGAAGTCGG | CTAGCTGTTATGGCTATTGCTGAA |
| | | GTAG | ACAGCAAAATT |
| 1050 | binder | ACAGTAGAGTAATATAGTCCGCGCACGT | CCTTACGACTTCACTGCAATTGAC |
| | | AC | GATTCAGTTAA |
| 1051 | neutral | GAGACAGCAAAAAGGTGGTTGTATAAAG | CCTCATACCAATGTAAAGTATAGT |
| | | TGCC | TAACGCCCTGT |
| 1052 | binder | GAGACAGGATGGCACAGTGGAGTAAG | CATCTCCATGACTGCTTGAGCGGC |
| | | | TGGAGAATCTG |
| 1053 | binder | ACAGTAGAGGTCACCGCACGTAC | CTTTCGCCACCCATATAAACCCCA |
| | | | CTTCGTCCTCA |
| 1054 | binder | CGGTAGAGGTTCTGTACGCACGTAC | CAAGGCAGAGCAAATGTGACACTG |
| | | | TCTATCAGTAC |
| 1055 | binder | GGGAGGGGACGCACGTAC | CCTACATATATAGGAAAAGGGAAG |
| | | | GTAGAAGAGCT |
| 1056 | binder | GAGACAGGAAAATCGCATACGTCTTGCA | CCTTCTGGAATTTCTTCCTTTGAT |
| | | TAC | TTTGCCATTTT |
| 1057 | binder | GAGGTGGATCGGTCTAGCACGTAC | CTCCTAAGGTTGCTGATTTGGTTG |
| | | | TTGGAGACCCA |
| 1058 | binder | ACGGTAGAGCTAAGCTAGCACGTACT | CAAGGCCTAGCCTAAAGGTTCTTG |
| | | | CAGAGCAACAT |
| 1059 | neutral | CGGCCTGCAGCACGTACT | CCTAATTAGCTCTAGGAAACACAA |
| | | | CCCCGGGATTT |
| 1060 | neutral | GAACGCCTGACCAGCACGTAC | CTTGAGTTATACGGAACTTCGCAA |
| | | | AAGTATTCCCT |
| 1061 | binder | GAGACAGAAATGCACAGTAGAGTAAAAT | CCATCCATCAACAACTGCTCCAAC |
| | | ATCTTGCCTG | AGCCTTTCCAT |
| 1062 | binder | GAGACAGGCACAGTAGAGGTGAGGATA | CCGGCACAAGCAGACAAAATCAAC |
| | | | ATGGTCATTTA |
| 1063 | binder | GAGACAGGGCATAAAGGGCACAGTA | CGCTCACGTGATCTACCCTAGCTG |
| | | | ACCGCTAATGA |
| 1064 | binder | GAGACAGTCAAGGAGCACGGTAGAG | CTCTAACCTGCATACATATGGCAT |
| | | | TTAGTTGTTCA |
| 1065 | binder | GGCACGGTAGAGAAATCGCATAACGTAC | CCTTCTTGAAGACCTATGTAAAGA |
| | | | AACGGGTCACT |
| 1066 | neutral | GAGACAGAGGATAAGGTCGTGTAATAGG | CCATACGCATGACTACATTACAAC |
| | | TGG | GGGCCAGGAAG |
| 1067 | neutral | GAGACAGAGAAGAAAGTAAGCGTTGGCA | CAGGTCTCGATCTCGTACAAAACG |
| | | C | ACTATGACCAT |
| 1068 | neutral | CCGGCTATGACTGCTTGAACGTACT | CATGAACGTGTCGTGTTATGCAGC |
| | | | GGTATGTCGTG |
| 1069 | binder | GAGACAGTTTGGTGGCACGGTAGA | CGTCGTGTCTTAGACGACTGTGTG |
| | | | TGATTCTCGAG |
| 1070 | binder | GCGAAATGACTGCGCAACGTACT | CCACCGTTTTGCCAGTTCCACCAG |
| | | | TAACTGTAAGG |
| 1071 | binder | AGAGTACTACCGCCTGACAACGTACT | CGCCCTGGAACAACGGTTATATTC |
| | | | TCTGGCAGAAC |

### Example 27: Oligonucleotide Probes: Aggressive Breast Cancer, Non-Aggressive Breast Cancer, and Non-Cancer

[1137] This Example presents oligonucleotide probes identified in an oligonucleotide probe library enriched against plasma-derived microvesicles from patients with aggressive breast cancer, non-aggressive breast cancer, and non-cancer (breast biopsy-negative samples). The general methodology follows that in Example 26 above. Oligonucleotides were screened using plasma samples from 60 individuals with breast cancer and 60 individuals without breast cancer.

[1138] A combination of ultracentrifugation and PEG based partitioning of microvesicles from each input plasma sample. The F-TRin-35n-B 8-3s library as described herein was enriched against microvesicles from pooled plasma samples (cancer or non-cancer pools) which were isolated using ultracentrifugation. Subsequent enrichments were performed by isolating the microvesicles using PEG precipitation. As in Example 26, the input oligonucleotide library was exposed to positive, negative and again positive targets sequentially and then PCR amplified. We performed two parallel tracks of initial enrichment against pooled samples, one track where pooled cancer samples were considered positive and non-cancer samples were negative, and another track where pooled non-cancer samples were considered positive and cancer samples were negative. The enriched libraries resulting from each track were pooled together before probing individual patient samples in the following experiments.

[1139] Oligonucleotides that Distinguish Aggressive and Non-Aggressive Breast Cancer

[1140] We first identified oligonucleotides that distinguished between aggressive and non-aggressive breast cancer. For these experiments, the aggressive breast cancer patient samples were considered as positive samples (31 samples) and non-aggressive breast cancer patient samples were considered as negative samples (29 samples). The enriched libraries from above were subjected to the oligonucleotide probing assay on the individual cancer plasma samples. A two-step normalization procedure was performed to normalize the sum of the copy numbers for all oligonucleotides associated with the PEG-precipitated pellet. The copy number of each recovered oligonucleotide was divided by the total number of sequence reads for each sample, then multiplied by the mean of totals of all samples. This data treatment accounts for the different number of sequence reads for each patient even though the same amount of DNA library was added for each patient-sample. The final value for each oligonucleotide for each patient is the average of normalized copy numbers from three probing replicates. We excluded oligonucleotides with an average read-count across all patients <100, and subsequently selected among the remaining oligonucleotides only those that show a >20% CV across the 60 patient samples. This process resulted in approximately 12000 remaining oligonucleotides.

[1141] We compared patient profiles using clustering analysis with one minus Pearson correlation coefficients (1−P_{c}) as the distance measure. The resulting heat-map based on the number of oligonucleotide sequence counts allows for visualisation of similarities in oligonucleotide copy numbers among all patient samples. See FIG. 15. In the figure, the X-axis shows individual oligonucleotides and the Y-axis shows samples (aggressive or other (i.e., non-aggressive)). Oligonucleotides from the indicated Cluster 1 have relatively low counts for the majority of aggressive cancers. Oligonucleotides from the indicated Clusters 2 and 3 have relatively higher counts in a majority of aggressive cancer samples. It is noted that oligonucleotide probes that are observed at either higher or lower relative copy number in the advanced cancer samples versus non aggressive can be used as markers to distinguish these sample groupings. Oligonucleotides from the indicated Cluster 4 were more selective toward particular aggressive cancer samples, and were able to identify additional 12 advanced cancer samples that were missed by oligonucleotides in Clusters 1-3. Cluster 4 oligonucleotides may be useful for detecting particular subsets of aggressive cancers.

[1142] The distances between samples within each cluster are considerably smaller than the distance between the two clusters. As can be seen in FIG. 15, these two groups of samples have very different proportions of advanced cancer cases versus other; in cluster I, 15 of the 19 patients are advanced cancer cases (79%), while in cluster II, only 16 of 40 patients are advanced cases (40%). Fisher exact p-value equals 0.01 with an odds ratio of 4.9, indicating that the ratio of advanced to other cancer in these two clusters is statistically significant.

[1143] The SEQ ID NOs. of the variable regions from the oligonucleotides in Clusters 1-4 in FIG. 15 are shown in Table 31. As in Table 27, the oligonucleotides were each synthesized with a 5′ region consisting of the sequence (5′-CTAGCATGACTGCAGTACGT (SEQ ID NO. 131)) and a 3′ region consisting of the sequence (5′-CTGTCTCTTATACACATCTGACGCTGCCGACGA (SEQ ID NO. 132)) flanking the variable region. The sequences can be used in the identification of aggressive breast cancer samples.

TABLE 31
Clusters 1-4 Variable Regions SEQ ID NOs

| Cluster | SEQ ID NO |
|---|---|
| Cluster 4 | 1072-1121 |
| Cluster 3 | 1122-1171 |
| Cluster 2 | 1172-1221 |
| Cluster 1 | 1222-1421 |

[1144] A selection of 50 negative control oligonucleotides was made from the same experiments as above. As criteria, we chose those oligonucleotides with the lowest variability (% cv) between biological samples when taking all 120 samples from the noted probing into account. The variable regions of the 50 negative controls are listed in SEQ ID NOs 1422-1471. As in Table 27, the oligonucleotides were synthesized with a 5′ region consisting of the sequence (5′-CTAGCATGACTGCAGTACGT (SEQ ID NO. 131)) and a 3′ region consisting of the sequence (5′-CTGTCTCTTATACACATCTGACGCTGCCGACGA (SEQ ID NO. 132)) flanking the variable regions. These sequences can be used as negative controls when identifying aggressive breast cancer samples.

[1145] Oligonucleotides Specific to Non-Cancer Samples Versus Cancer Samples

[1146] We also identified a set of oligonucleotides that were specific to the non-cancer plasma samples. In addition to probing the cancer samples noted above, the enriched oligonucleotide probe library was used to perform the probing test on the 60 individual non-cancer plasma samples. Each sample was probed as described above. The oligonucleotides recovered with each individual non-cancer and cancer plasma sample were identified using next-generation sequencing. The averaged frequencies of individual oligonucleotide sequence reads between non-cancer and cancer samples were used to calculate a fold-change of non-cancer versus cancer. Oligonucleotides with both read counts above 100 and fold change (non-cancer/cancer) greater or equal to 2 were identified as non-cancer specific oligonucleotide probes (SEQ ID NOs. 1472-1486). In addition, a selection of negative control oligonucleotides were selected as those with fold change less than or equal to 1 and read count below 20 (SEQ ID NOs 1487-1501).

[1147] The variable regions of the non-cancer specific oligonucleotides and negative control oligonucleotides are listed by rank order in SEQ ID NOs. 1472-1486 and SEQ ID NOs 1487-1501, respectively. As in Table 27, the oligonucleotides were synthesized with a 5′ region consisting of the sequence (5′-CTAGCATGACTGCAGTACGT (SEQ ID NO. 131)) and a 3′ region consisting of the sequence (5′-CTGTCTCTTATACACATCTGACGCTGCCGACGA (SEQ ID NO. 132)) flanking the variable regions. The sequences can be used to identify non-cancer samples (SEQ ID NOs. 1472-1486) or used as negative controls for such experiments (SEQ ID NOs 1487-1501).

[1148] Oligonucleotides Specific to Cancer Samples Versus Non-Cancer

[1149] We then identified a set of oligonucleotides that were specific to the cancer plasma samples as compared to the non-cancer samples. Pooled cancer and non-cancer samples were probed as described above. The oligonucleotides recovered with each individual cancer and non-cancer plasma sample were identified using next-generation sequencing. The averaged frequencies of individual oligonucleotide sequence reads between cancer and non-cancer samples were used to calculate a fold-change of cancer versus non-cancer. Oligonucleotides with both read counts above 10 and fold change (non-cancer/cancer) greater or equal to 1.5 were identified as cancer specific oligonucleotide probes (SEQ ID NOs. 1502-1539). In addition, a selection of negative control oligonucleotides were selected as those with fold change less than or equal to 1 and read count below 20. See SEQ ID NOs 1487-1501 as described above.

[1150] The variable regions of the cancer specific oligonucleotides are listed by rank order in SEQ ID NOs. 1502-1539. As in Table 27, the full length oligonucleotides were synthesized with a 5′ region consisting of the sequence (5′-CTAGCATGACTGCAGTACGT (SEQ ID NO. 131)) and a 3′ region consisting of the sequence (5′-CTGTCTCTTATACACATCTGACGCTGCCGACGA (SEQ ID NO. 132)) flanking the variable regions. These sequences which can be used to identify cancer samples.

### Example 28: Oligonucleotide Probes: Aggressive Breast Cancer, Non-Aggressive Cancer and Non-Cancer/Healthy Blood Plasma Targets with UC and PEG

[1151] This Example builds on the work presented in Example 27. Based on the results of the probing Aggressive cancer pool (50% patients with aggressive breast cancer), Non-Aggressive cancer pool and Healthy Pool (50% biopsy confirmed non-cancer and 50% healthy non-cancer), we obtained aptamers specific for:

[1152] Aggressive cancer compared to non-aggressive cancer and to non-cancer/healthy samples.

[1153] Non-aggressive cancer compared to aggressive and to non-cancer/healthy samples.

[1154] Non-Cancer/Healthy samples compared to aggressive and non-aggressive samples.

[1155] A combination of ultracentrifugation and PEG based partitioning of microvesicles from each input plasma sample. This approach potentially provides a cleaner patient sample and thus provide higher specificity for the intended target. As in Example 27, the input oligonucleotide library was exposed to positive, negative and again positive targets sequentially and then PCR amplified. Enriched libraries were subjected to the oligonucleotide probing assay on the plasma samples using sample pools as follows: ACP—aggressive cancer pool; NACP—non-aggressive cancer pool; HP—healthy pool (mix of non-cancer and normal samples). Each sample pool was probed two naïve (i.e., untrained) oligonucleotide probe libraries (6-3S and 8-3S described herein) with three replicates. Samples were sequenced in multiplex with 9 samples per flow cell. Indexing PCR was performed either with or without internal standard. The average number of sequence read counts between three replicates was considered for fold change and TTEST calculations. Sequences were identified that met the following criteria: fold change between pools >=2; p-value=<0.05, % cv=<20%, counts >=100.

[1156] The joint selection of oligonucleotides that passed the above criteria is shown in Tables 32 and 33. As in Table 27, the oligonucleotides each have a 5′ region consisting of the sequence (5′-CTAGCATGACTGCAGTACGT (SEQ ID NO. 131)) and a 3′ region consisting of the sequence (5′-CTGTCTCTTATACACATCTGACGCTGCCGACGA (SEQ ID NO. 132)). Tables 32 and 33 list in rank order the SEQ ID NOs of the variable region that are positioned between the 5′ and 3′ regions. The differences are that the starting libraries were derived from a first round of enrichment against a cancer pool (Table 32) or a first round of enrichment against a non-cancer pool (Table 33). However, after the first round the aliquots were pooled for subsequent enrichment. The combined oligonucleotide probe library can be used to distinguish between aggressive breast cancer, non-aggressive breast cancer, and non-cancer plasma samples in a single assay according to the column “Comparison.” In the Comparison column, sequences elevated in group 1 as compared to group 2 are shown as group 1/group 2. The legend for this column is “ACP”: Aggressive cancer pool; “HP”: healthy & non-cancer pool; “NACP”: Non-aggressive cancer pool. “IntSt” in the comparison row indicates that an internal standard was used during the enrichment. By way of illustration, the first two sets of comparisons in Table 32 are labeled ACP/HP, which indicates that these oligonucleotides were observed at high copy numbers after probing the aggressive breast cancer sample pool versus the healthy/non-cancer sample pool. Continuing with this illustration, higher numbers of such oligonucleotide probes binding to a sample can indicate the presence of an aggressive breast cancer.

TABLE 32
Oligonucleotide Probe Comparison and Variable Regions

| Comparison | SEQ ID NO. |
|---|---|
| ACP/HP (IntSt) | 1540-1551 |
| ACP/HP | 1552-1585 |
| HP/ACP (IntSt) | 1586-1611 |
| HP/ACP | 1612-1650 |
| NACP/HP (IntSt) | 1651-1655 |
| NACP/HP | 1656-1733 |
| HP/NACP (IntSt) | 1734-1754 |
| HP/NACP | 1755-1789 |
| NACP/ACP (IntSt) | 1790-1793 |
| ACP/NACP (IntSt) | 1794-1805 |
| ACP/NACP | 1806-1815 |

TABLE 33
Oligonucleotide Probe Comparison and Variable Regions

| Comparison | SEQ ID NO. |
|---|---|
| ACP/HP (IntSt) | 1816-1822 |
| ACP/HP | 1823-2004 |
| HP/ACP (IntSt) | 2005-2054 |
| HP/ACP | 2055-2234 |
| NACP/HP (IntSt) | 2235-2242 |
| NACP/HP | 2243-2318 |
| HP/NACP (IntSt) | 2319-2356 |
| HP/NACP | 2357-2491 |
| NACP/ACP (IntSt) | 2492-2507 |
| NACP/ACP | 2508-2583 |
| ACP/NACP (IntSt) | 2584-2593 |
| ACP/NACP | 2594-2728 |

### Example 29: Oligonucleotide Probes: Non-Aggressive Cancer Probes Identified in Libraries Enriched with Multiple Protocols

[1157] This Example builds on the work presented in Example 28. Here, we identified a set of oligonucleotide probes specific for non-aggressive cancer samples. The oligonucleotide probes were identified based on probing using an aggressive cancer pool (ACP), non-aggressive cancer pool (NACP) and healthy pool (HP) of plasma samples with naïve oligonucleotide libraries. Compared to the work in Example 28, four different enrichment schemes were used, as further detailed below. For purposes of these experiments, non-aggressive (or non-advanced) cancer is defined as sample with tumor size not exceeding stage T1, presence of nodes NO, Metastasis M0 and positive estrogen/progesterone receptors.

[1158] In each case, the enriched libraries were subjected to the probing test on pooled plasma samples. The library enrichment was performed as described herein, see e.g., Example 21. The libraries were exposed to positive and negative targets and PCR amplified either after each binding or after series positive-negative-positive binding as described below. The positive and negative pools are indicated below for the different enrichment schemes. After each round of enrichment, next generation sequencing was used to determine a copy number of the recovered oligonucleotide probes. Averaged frequencies of individual oligonucleotide between the indicate pools were used to calculate the fold change. Oligonucleotide with counts above 50, fold change >=2 and % cv between replicates below 20% were considered as candidates and shown in the tables below.

[1159] Scheme 1

[1160] The positive target was the NACP plasma and the negative target was the HP plasma. The enrichment started with the naïve (non-enriched; NE) library. Microvesicles in the samples were isolated using ultracentrifugation in all stages. Each round of enrichment consisted of a complete set of positive-negative-positive binding events followed by PCR amplification of the enriched library. Two such rounds of binding were performed. The resulting library after the second enrichment (R2) is used for subsequent probing of the pooled samples (aggressive cancer, non-aggressive cancer and healthy). As in Example 28 above, comparisons performed included ACP/HP, HP/ACP, ACP/NACP, NACP/ACP, HP/NACP, NACP/HP.

[1161] Resulting oligonucleotides identified in these selections are shown in Table 34. As in Table 27, the oligonucleotides each have a 5′ region consisting of the sequence (5′-CTAGCATGACTGCAGTACGT (SEQ ID NO. 131)) and a 3′ region consisting of the sequence (5′-CTGTCTCTTATACACATCTGACGCTGCCGACGA (SEQ ID NO. 132)). Table 34 lists the SEQ ID NOs in rank order of the variable regions that are positioned between the 5′ and 3′ regions. The combined oligonucleotide probe library can be used to distinguish between aggressive breast cancer, non-aggressive breast cancer, and non-cancer plasma samples in a single assay according to the column “Comparison.” In the Comparison column, sequences elevated in group 1 as compared to group 2 are shown as group 1/group 2. The legend for this column is “ACP”: Aggressive cancer pool; “HP”: healthy & non-cancer pool; “NACP”: Non-aggressive cancer pool. By way of illustration, the first two sets of comparisons in Table 34 are labeled ACP/HP, which indicates that these oligonucleotides were observed at high copy numbers after probing the aggressive breast cancer sample pool versus the healthy/non-cancer sample pool. Continuing with this illustration, higher numbers of such oligonucleotide probes binding to a sample can indicate the presence of an aggressive breast cancer.

TABLE 34
Enrichment Scheme 1 Oligonucleotide
Probe Comparison and Variable Regions

| Comparison | SEQ ID NO. |
|---|---|
| HP/ACP | 2729-2737 |
| ACP/HP | 2738-2742 |
| ACP/NACP | 2743-2745 |
| NACP/ACP | 2746-2753 |
| NACP/HP | 2754 |
| HP/NACP | 2755-2763 |

[1162] Scheme 2

[1163] In this enrichment, the positive target is NACP plasma and the negative target is the HP plasma. The starting input library is the C-R8N-1 (i.e., previously enriched for a cancer pool with 48% of aggressive cancer samples; see description of the C-RN7 library in Example 26 with one additional round of positive selection performed). The microvesicle partitioning was performed using PEG precipitation. PCR amplification is done after each binding. The resulting library after this ninth (Round 9) round of enrichment is used for probing. Three different input criteria for used for round 9: 1) R9-2—library input 0.1 ng; 2) R9-1c—library input is Ing; 3) R9—5× input of competitor DNA. The R9-2 and R9-1c oligonucleotide libraries were then used for subsequent probing of the pooled samples (aggressive cancer, non-aggressive cancer and healthy). As above, comparisons performed included ACP/HP, HP/ACP, ACP/NACP, NACP/ACP, HP/NACP, NACP/HP.

[1164] Resulting oligonucleotides identified from the R9-1c and R9-2 oligonucleotide libraries in these selections are shown in Table 35 and Table 36, respectively. As in Table 27, the oligonucleotides each have a 5′ region consisting of the sequence (5′-CTAGCATGACTGCAGTACGT (SEQ ID NO. 131)) and a 3′ region consisting of the sequence (5′-CTGTCTCTTATACACATCTGACGCTGCCGACGA (SEQ ID NO. 132)). Tables 35 and 36 list the SEQ ID NOs in rank order of the variable regions that are positioned between the 5′ and 3′ regions. When combined, the oligonucleotide probe libraries can be used to distinguish between aggressive breast cancer, non-aggressive breast cancer, and non-cancer plasma samples in a single assay according to the column “Comparison.” In the Comparison column, sequences elevated in group 1 as compared to group 2 are shown as group 1/group 2. The legend for this column is “ACP”: Aggressive cancer pool; “HP”: healthy & non-cancer pool; “NACP”: Non-aggressive cancer pool. By way of illustration, the first two sets of comparisons in Table 35 are labeled ACP/HP, which indicates that these oligonucleotides were observed at high copy numbers after probing the aggressive breast cancer sample pool versus the healthy/non-cancer sample pool. Continuing with this illustration, higher numbers of such oligonucleotide probes binding to a sample can indicate the presence of an aggressive breast cancer.

TABLE 35
Enrichment Scheme 2 R9-1c Oligonucleotide
Probe Comparison and Variable Regions

| Comparison | SEQ ID NO. |
|---|---|
| ACP/HP | 2764-2791 |
| HP/ACP | 2792-2793 |
| ACP/NACP | 2794-2815 |
| NACP/ACP | 2816-2830 |
| HP vs NACP | 2831-2845 |
| NACP vs HP | 2846-2858 |

TABLE 36
Enrichment Scheme 2 R9-2 Oligonucleotide
Probe Comparison and Variable Regions

| Comparison | SEQ ID NO. |
|---|---|
| ACP/HP | 2859-2867 |
| HP/ACP | 2868-2892 |
| ACP/NACP | 2893-2904 |
| NACP/ACP | 2905-2938 |
| HP/NACP | 2939-2941 |
| NACP/HP | 2942-2950 |

[1165] Scheme 3

[1166] The positive target was the NACP plasma and the negative target was the HP plasma. The enrichment started with the naïve (non-enriched; NE) library. Microvesicles in the samples were isolated using PEG precipitation. Six rounds of enrichment were performed with PCR amplification performed after each round. The round alternated between a single selection of positive or negative selection (i.e., positive selection in rounds 1, 3, 5 and negative selection in rounds 2, 4, and 6). The resulting library after round 6 is used for probing of the pooled samples (aggressive cancer, non-aggressive cancer and healthy) with library input 0.1 ng. As above, comparisons performed included ACP/HP, HP/ACP, ACP/NACP, NACP/ACP, HP/NACP, NACP/HP.

[1167] Resulting oligonucleotides identified in these selections are shown in Table 37. As in Table 27, the oligonucleotides each have a 5′ region consisting of the sequence (5′-CTAGCATGACTGCAGTACGT (SEQ ID NO. 131)) and a 3′ region consisting of the sequence (5′-CTGTCTCTTATACACATCTGACGCTGCCGACGA (SEQ ID NO. 132)). Table 37 lists the SEQ ID NOs in rank order of the variable regions that are positioned between the 5′ and 3′ regions. The combined oligonucleotide probe library can be used to distinguish between aggressive breast cancer, non-aggressive breast cancer, and non-cancer plasma samples in a single assay according to the column “Comparison.” In the Comparison column, sequences elevated in group 1 as compared to group 2 are shown as group 1/group 2. The legend for this column is “ACP”: Aggressive cancer pool; “HP”: healthy & non-cancer pool; “NACP”: Non-aggressive cancer pool. By way of illustration, the first two sets of comparisons in Table 37 are labeled ACP/HP, which indicates that these oligonucleotides were observed at high copy numbers after probing the aggressive breast cancer sample pool versus the healthy/non-cancer sample pool. Continuing with this illustration, higher numbers of such oligonucleotide probes binding to a sample can indicate the presence of an aggressive breast cancer.

TABLE 37
Enrichment Scheme 3 Oligonucleotide
Probe Comparison and Variable Regions

| Comparison | SEQ ID NO. |
|---|---|
| ACP/HP | 2951-2960 |
| HP/ACP | 2961-2972 |
| ACP/NACP | 2973-2976 |
| NACP/ACP | 2977-2990 |
| HP vs NACP | 2991-3003 |
| NACP/HP | 3004-3017 |

[1168] Scheme 4

[1169] Starting aptamer library is C-R8N-3 (library previously enriched for Cancer pool with 48% of aggressive cancer samples and input 0.001 ng). Microvesicles in the samples were isolated using PEG precipitation. PCR amplification is done after each binding. There was only negative target used (the NACP), which is unique for the selection scheme versus the three above. This enrichment was meant to further enrich C-R8N library toward aggressive cancer targets by removing oligonucleotides specific to non-aggressive targets. Four negative selection rounds were performed. Two different input criteria for used for probing after round 13 (R13): 1) R13-3—library input 0.01 ng; 2) R13-4—library input 0.001 ng. The R13-3 and R13-4 oligonucleotide libraries were then used for subsequent probing of the pooled samples (aggressive cancer, non-aggressive cancer and healthy). As above, comparisons performed included ACP/HP, HP/ACP, ACP/NACP, NACP/ACP, HP/NACP, NACP/HP.

[1170] The variable regions of the resulting oligonucleotides identified from the R13-3 and R13-4 oligonucleotide libraries in these selections are shown in Table 38 and Table 39, respectively. As in Table 27, the oligonucleotides each have a 5′ region consisting of the sequence (5′-CTAGCATGACTGCAGTACGT (SEQ ID NO. 131)) and a 3′ region consisting of the sequence (5′-CTGTCTCTTATACACATCTGACGCTGCCGACGA (SEQ ID NO. 132)). Tables 38 and 39 list the SEQ ID NOs in rank order of the variable regions that are positioned between the 5′ and 3′ regions. When combined, the oligonucleotide probe libraries can be used to distinguish between aggressive breast cancer, non-aggressive breast cancer, and non-cancer plasma samples in a single assay according to the column “Comparison.” In the Comparison column, sequences elevated in group 1 as compared to group 2 are shown as group 1/group 2. The legend for this column is “ACP”: Aggressive cancer pool; “HP”: healthy & non-cancer pool; “NACP”: Non-aggressive cancer pool. By way of illustration, the first two sets of comparisons in Table 38 are labeled ACP/HP, which indicates that these oligonucleotides were observed at high copy numbers after probing the aggressive breast cancer sample pool versus the healthy/non-cancer sample pool. Continuing with this illustration, higher numbers of such oligonucleotide probes binding to a sample can indicate the presence of an aggressive breast cancer.

TABLE 38
Enrichment Scheme 4 R13-3 Oligonucleotide Probe Comparison and
Variable Regions

| Comparison | SEQ ID NO. | Variable Region Sequence |
|---|---|---|
| ACP/HP | 3018-3030 | ACCATCGGGTCACGTAAAAGCGGTTCTAATTTCTAA |
| HP/ACP | 3031-3043 | ACGCAGTGCCGCCGAATCCTGATCCCCTAACTTTC |
| ACP/NACP | 3044-3052 | ACCACTGAACTCATGGTACTAATCACACACCAATT |
| NACP/ACP | 3053-3061 | ACTGACTGCATACATCCGCATATTAAACCCGTATT |
| HP/ACP | 3062-3083 | ACGCCTGTACGATGTCCTCGGTCTCATTTTATTTC |
| ACP/HP | 3084-3096 | ACTGCGGTCATCGAGTTACTGGCTATTGCCTGACC |

TABLE 39
Enrichment Scheme 4 R13-4 Oligonucleotide Probe Comparison and
Variable Regions

| Comparison | SEQ ID NO. | Variable Region Sequence |
|---|---|---|
| ACP/HP | 3097-3099 | AATGCATTGCGTTATTTCAATTGAGGCGTCCTAAAA |
| HP/ACP | 3100-3107 | CATACGCACGGTCCTCTACTATAATTGTCCACCAA |
| ACP/NACP | 3108-3117 | AGCCCGTTGCTACGTTGCAGTAGGTGTAACTTCACTGA |
| NACP/ACP | 3118-3130 | AGCGGTCACCGCCTATGGTTATTCATTTTTCTCTTA |
| HP/NACP | 3131-3141 | AGCCCGTTGCTACGTTGCAGTAGGTGTAACTTCACTGA |
| NACP/HP | 3142-3150 | ACCACGTTGGTTATTGCCCTGCTTTGAAGTCTTACGA |

### Example 30: Use of an Oligonucleotide Probe Library to Characterize Breast Cancer Samples

[1171] An oligonucleotide probe library comprising approximately 2000 different probe sequences was constructed and used to probe approximately 500 individual breast cancer and non-cancer samples. The probe sequences were derived from different screening experiments and are listed herein in SEQ ID NOs 137-969 and 1072-3150. The oligonucleotides listed in these tables were synthesized and pooled together. The samples were plasma samples from 212 breast cancer patients, 177 biospy confirmed non-cancer patients, and 117 normal control patients (self-reported as non-cancer). Experiments details are as provided above. The plasma samples were contacted with the oligonucleotide probe library and microvesicles were isolated using PEG precipitation. Oligonucleotides that were recovered with the microvesicles were isolated. Next Generation Sequencing (Illumina HiSeq) was used to identify the isolated sequences for each sample.

[1172] Analysis of significance of difference identified 18 aptamers with p-values below 0.01 when compared Cancer/Normal, 15 aptamers with p-values below 0.001 when compared cancer/Non-Cancer, 28 aptamers with p-values below 0.001 when compared Non-Cancer/Normal.

[1173] Multi-oligonucleotide panels were next constructed using a cross-validation approach. Briefly, 50 samples were randomly withheld from the sample cohort. The performance of individual oligonucleotides to distinguish the remaining cancers and non-cancer/normals was determined using logistic regression methodology. Additional oligonucleotides were added iteratively and performance was assessed using logistic regression until further performance improvements were no longer obtained with additional oligonucleotides. The approach generally led to panels of approximately 20-100 different probe sequences. The constructed panels were then used to classify the 50 withheld samples and diagnostic performance was assessed using Receiver Operating Curve (ROC) analysis and estimation of the Area Under the Curve (AUC).

[1174] In approximately 300 rounds of cross-validation, the average AUC was 0.6, thus showing that the average performance was statistically better than random (i.e., AUC of 0.5) and that the probe library could distinguish breast cancer and non-breast cancer/normal patient samples. AUC values as high as 0.8 were observed for particular cross validations. FIGS. 16A-B illustrate a model generated using a training (FIG. 16A) and test (FIG. 16B) set from a round of cross validation. The AUC was 0.803. The variable regions of the sequences used to build this model are shown in Table 40. Another exemplary round of cross-validation is shown in FIGS. 16C-D. The AUC was 0.678.

[1175] The SEQ ID NOs. of the sequences used in the model in FIGS. 16A-B are listed in rank in Table 40. As in Table 27, the oligonucleotides were synthesized with a 5′ region consisting of the sequence (5′-CTAGCATGACTGCAGTACGT (SEQ ID NO. 131)) and a 3′ region consisting of the sequence (5′-CTGTCTCTTATACACATCTGACGCTGCCGACGA (SEQ ID NO. 132)) flanking the variable regions.

TABLE 40
Oligonucleotide Probe Variable Regions
Rank Ordered SEQ ID NOs

215, 1286, 961, 1837, 780, 1319, 3032, 626, 2816, 1311, 364, 3102, 3115, 886, 414, 517, 599, 246, 416,
223, 507, 586, 1455, 1560, 1241, 2771, 1513, 2994, 2757, 461, 1917, 1178, 299, 1409, 959, 785, 322,
636, 1244, 665, 592, 823, 168, 1183, 3000, 182, 534, 1580, 2753, 2989, 1957, 2829, 1960, 856, 3149,
283, 1551, 1974, 605, 363, 266, 3140, 2242, 1306, 652, 634, 2763, 1270, 1728, 893, 1266, 1372, 1141,
1731, 1197, 1649

[1176] The data presented in this Example demonstrate that an oligonucleotide pool comprising members having the variable regions listed in SEQ ID NOs 137-969 and 1072-3150, e.g., a pool of probes having the variable regions listed in Table 40, can be used to distinguish plasma from individuals having breast cancer versus plasma from non-breast cancer individuals.

### Example 31: Updated Oligonucleotide Pools to Characterize Breast Cancer Samples

[1177] The profiling of 500 clinical samples with an oligonucleotide probe library comprising 2000 oligonucleotides showed significant ability to distinguish breast cancer from non-cancer control samples. See Example 30 above. When performing cross-validation in these experiments, it was observed that 85 out of 500 were misclassified at a higher rate compared to the other samples. We therefore identified another selection of oligonucleotide probe which were able to correctly classify the noted samples. These 85 samples were profiled with a naïve oligonucleotide probe library (6-3S/8-3S), and enriched on breast cancer and non-cancer plasma using methodology presented in the Examples above. The selected oligonucleotides were compared to a positive controls cohort, which comprised of the cancer and non-cancer samples that were consistently classified correctly within the experiments in Example 30 above. Oligonucleotides were selected based on absolute number of copies sequenced of at least 50 and various criteria when comparing sample groups including: 1) copy number fold-change (fc) of at least 1.2; 2) effect size (es) above 0.6; 3) t-test (p-value<=0.05); and 4) Kolmogorov-Smirnov test (ks) (p-value<=0.05). Effect size is a population effect size calculated as (mean(group 1)−mean(group2))/standard deviation(group 1 and group2).

[1178] The profiling data were normalized by dividing the count of each particular oligonucleotide by the total counts for particular sample and multiplying by the global mean across the entire experiment. These normalized values were used to calculate the statistical criteria specified above to compare the following samples type: Misclassified Cancer (“C”), misclassified non-cancer (“NC”), positive control Cancer (“C-P”), positive control Non-Cancer (“NC-P”), misclassified Normal (“N”). The comparisons performed and numbers of resulting oligonucleotides are shown in Table 41. Negative controls are oligonucleotides that did not match any criteria and thus should not distinguish be any samples groups.

TABLE 41
Oligonucleotide probe candidates were
selected from the following comparisons

| Specificity | Total |
|---|---|
| C/NC-P* A** and C/NC-P B*** | 82 |
| C/NC-P A | 108 |
| C/NC-P B | 13 |
| Negative control | 60 |
| C-P/NC A C-P/NC B | 34 |
| C-P/NC A | 68 |
| C-P/NC B | 101 |
| NC/C-P A NC/C-P B | 7 |
| NC/C-P A | 196 |
| NC-P/C A NC-P/C B | 65 |
| NC-P/C A | 83 |
| NC-P/C B | 55 |
| C + C-P/N | 103 |
| N/C + C-P | 25 |
| Total | 1000 |

*“C/NC-P” in Table 41 means that oligonucleotides were selected with specificity toward cancer (“C”) while compared to Non-Cancer positive (“NC-P”) control.
A** - selection criteria: counts > 50, fc ≥ 1.2, es > 0.6, ttest p < 0.05,
B*** - selection criteria: counts > 200, estimated sample size < 71, fc > 1.2, ttest/ks test p < 0.05.

[1179] The sequences selected based on Table 41 are shown in Table 42. As in Table 27, the oligonucleotides each have a 5′ region consisting of the sequence (5′-CTAGCATGACTGCAGTACGT (SEQ ID NO. 131)) and a 3′ region consisting of the sequence (5′-CTGTCTCTTATACACATCTGACGCTGCCGACGA (SEQ ID NO. 132)). Table 42 lists in rank order the SEQ ID NOs of the variable regions that are positioned between the 5′ and 3′ regions. The column “Specificity” shows the specificity of the oligonucleotides based on the comparisons in Table 41.

TABLE 42
Oligonucleotide Probe Variable Regions

| Specificity | SEQ ID NO. |
|---|---|
| C/NC-P A and C/NC-P B | 3151-3232 |
| C/NC-P A | 3233-3340 |
| C/NC-P B | 3341-3353 |
| Negative control | 3354-3368 |
| C-P/NC A C-P/NC B | 3369-3402 |
| C-P/NC A | 3403-3470 |
| C-P/NC B | 3471-3571 |
| Negative control | 3572-3586 |
| NC/C-P A NC/C-P B | 3587-3593 |
| NC/C-P A | 3594-3789 |
| Negative control | 3790-3804 |
| NC-P/C A NC-P/C B | 3805-3869 |
| NC-P/C A | 3870-3952 |
| NC-P/C B | 3953-4007 |
| Negative control | 4008-4022 |
| C/N | 4023-4125 |
| N/C | 4126-4150 |

[1180] The 1000 selected oligonucleotides are synthesized as DNA with a 5′ biotinylation. The synthesized oligonucleotides are pooled with 1000 of the most informative aptamers from the profiling performed in Example 30 to create a further optimized oligonucleotide probing library that can be used to distinguish cancer and normal samples.

### Example 32: Comparison of Oligonucleotide Pools

[1181] In this Example, the performance of the oligonucleotide pool from Example 30 was compared to the performance of the oligonucleotide pool from Example 31 to characterize breast cancer samples. In this Example, the oligonucleotide pool from Example 30 is referred to as the 2000v1 and the oligonucleotide pool from Example 30 is referred to as the 2000v2. A random forest approach was used to analyze the data, which data was obtained for the 2000v1 library in Example 30. The 2000v2 data was obtained via tested on a cohort of 858 plasma samples which comprised some samples described in Example 30 with additional samples according to three groupings: 194 breast cancer positive, 382 breast cancer negative as confirmed by biopsy (“non-cancer”), and 282 self declared normals (“normal”).

[1182] ROC curves are shown in FIGS. 22A-D for the various settings. AUC values are shown above the curve and are statistically significant from random (i.e., AUC=0.5) in all cases. In FIG. 22A, the 2000v1 probe library was used to distinguish cancer samples versus biopsy confirmed non-cancer samples. In FIG. 22B, the 2000v2 probe library was used to distinguish the same sample groupings. A small improvement in AUC was observed with the 2000v2 probe library in this setting. In FIG. 22C, the 2000v1 probe library was used to distinguish cancer samples versus self-declared normal samples. In FIG. 22D, the 2000v2 probe library was used to distinguish the same sample groupings. A small decline in AUC was observed with the 2000v2 probe library in this setting. Highly stringent

[1183] The SEQ ID NOs. of the variable regions of informative oligonucleotides from the 2000v1 and 2000v2 libraries are listed in Table 43. As above, the oligonucleotides were synthesized with a 5′ region consisting of the sequence (5′-CTAGCATGACTGCAGTACGT (SEQ ID NO. 131)) and a 3′ region consisting of the sequence (5′-CTGTCTCTTATACACATCTGACGCTGCCGACGA (SEQ ID NO. 132)) flanking the variable regions. The listed oligonucleotides were used in the Random Forest modeling to generate AUC values, e.g., as shown in FIGS. 22A-D, and are listed in rank order. The row “Common” in Table 43 shows overlapping informative sequences from the 2000v1 and 2000v2 settings.

TABLE 43
Informative oligonucleotide probes

| Setting | SEQ ID NO. |
|---|---|
| 2000v1 | 1102, 624, 3032, 597, 2831, 1923, 706, 752, 1188, 238, 605, 2809, 651, 611, 2830, 1163, |
| | 1187, 1106, 421, 843, 1186, 1100, 1235, 3140, 173, 1243, 289, 178, 3035, 1080, 890, 1225, |
| | 1995, 508, 183, 435, 2584, 2795, 1814, 1924, 3075, 939, 1183, 431, 938, 1731, 1095, 446, |
| | 623, 1732, 3024, 216, 626, 672, 457, 830, 1497, 777, 610, 3038, 1460, 665, 1079, 148, 1445, |
| | 885, 1697, 1197, 1769, 965, 164, 838, 606, 3018, 493, 1830, 859, 2047, 1837, 404, 1693, |
| | 1201, 899, 264, 841, 1678, 1949, 628, 354, 1523, 3036, 495, 727, 1997, 676, 546, 1507, 615, |
| | 616, 3096, 1435, 1194, 1195, 698, 660, 1994, 1123, 290, 934, 428, 715, 751, 3064, 602, 345, |
| | 662, 1820, 586, 241, 929, 1136, 316, 803, 3095, 936, 1381, 537, 254, 1119, 1652, 1955, |
| | 1534, 2965, 496, 405, 757, 612, 145, 1248, 599, 942, 505, 907, 1353, 2786, 1509, 211, 1170, |
| | 736, 486, 815, 540, 1540, 1250, 3000, 2971, 348, 3108, 445, 1548, 1723, 888, 1284, 604, |
| | 858, 1372, 1083, 584, 767, 3135, 855, 2730, 805, 1557, 565, 1600, 920, 2330, 1977, 710, |
| | 1220, 1907, 441, 795, 1939, 1386, 908, 2986, 350, 552, 2953, 3134, 250, 765, 827, 1216, |
| | 526, 969, 1903, 693, 650, 1359, 789, 747, 826, 2002, 1291, 639, 1244, 573, 3119, 523, 594, |
| | 854, 898, 429, 1881, 569, 1538, 848, 738, 911, 669, 909, 329, 577, 2964, 272, 648, 1481, |
| | 1719, 816, 2981, 533, 2748, 1660, 3050, 755, 1706, 1504, 3059, 1276, 1547, 2732, 922, |
| | 2977, 2952, 1522, 1273, 1399, 1556, 2998, 853, 1256, 845, 625, 2005, 2987, 2985, 1327, |
| | 807, 923, 1500, 1331, 2497, 641, 1282, 1940, 629, 2970, 1150, 1915, 1862, 389, 1304, 2979, |
| | 3061, 1328, 2740, 819, 353, 396, 2983, 1164, 3029, 1566, 2041, 2972, 966 |
| 2000v2 | 4116, 171, 3280, 3401, 3879, 1175, 3291, 651, 3343, 592, 3110, 3682, 605, 3231, 3556, 389, |
| | 624, 399, 3173, 3483, 795, 3918, 211, 309, 3595, 4101, 3780, 1169, 803, 1392, 3332, 415, |
| | 3652, 1610, 3262, 163, 1477, 4044, 3319, 722, 3607, 3414, 564, 511, 826, 431, 4052, 3329, |
| | 692, 3153, 295, 1548, 635, 3900, 370, 3698, 342, 3545, 614, 178, 3699, 467, 3307, 770, |
| | 4055, 3912, 164, 3232, 4048, 2762, 3856, 2587, 421, 3683, 3000, 633, 3712, 3466, 3769, |
| | 3537, 4058, 4018, 2808, 4026, 3785, 4083, 3151, 1288, 4050, 3560, 3786, 1121, 3742, 3128, |
| | 4132, 1171, 3619, 3471, 566, 3751, 4110, 4091, 787, 1176, 3735, 538, 240, 3064, 2754, |
| | 3035, 199, 3777, 831, 1247, 1188, 3667, 3086, 3741, 3650, 1272, 3402, 3317, 3618, 1466, |
| | 1590, 3489, 3659, 1091, 3601, 4023, 1469, 1777, 2008, 4059, 1593, 4062, 205, 2838, 3087, |
| | 2835, 3661, 1661, 3551, 3612, 1322, 3629, 3789, 2017, 1325 |
| Common | 1188, 3064, 421, 624, 389, 803, 431, 826, 3035, 164, 178, 651, 3000, 1548, 211, 605, 795 |

[1184] The data presented in this Example demonstrate that an oligonucleotide pool comprising members having the variable regions listed in SEQ ID NOs 137-969 and 1072-4150, e.g., a pool of probes having the variable regions listed in Table 43, can be used to distinguish plasma from individuals having breast cancer versus plasma from non-breast cancer individuals.

### Example 33: Photo-Cleavable Biotin Mediated Purification of an Oligonucleotide Library

[1185] Tag probe and capture probe detection systems may have advantages in the read-out of oligonucleotide-based assays since such systems allow direct quantification of oligonucleotides without amplification. Amplification may introduce amplification bias, e.g., wherein some sequences are preferentially amplified versus others. One such system is the nCounter nucleic acid detection system from NanoString Technologies, Inc. (Seattle, Wash.). This system can be used to detect oligonucleotide probes of the invention. See, e.g., FIG. 14G and related discussion. Current applications of tag and capture probe detection systems include gene expression analysis, RNA:Protein analysis; single cell gene expression analysis; miRNA expression analysis, miRGE analysis, copy number variation analysis, IncRNA expression analysis; ChiP-String expression analysis. See, e.g., www.nanostring.com/applications/.

[1186] In this Example, we improved using the Nanostring system to detect the oligonucleotide probe libraries of the invention. As described above, a pre-enriched oligonucleotide probe library is contacted with a biological sample such as plasma, and microvesicles bound by various oligonucleotide probes are precipitated, e.g., with PEG. Thus, the oligonucleotide probe library is present in the mix with PEG/proteins. This mixture is compatible with PCR steps used for next-generation sequencing (NGS) preparation, but the Nanostring system may not detect probes in these mixtures. Without being bound by theory, this interference may be due to noted impurities with hybridization of the probes and other oligonucleotides used in purifications steps. We developed a protocol for purification of post-probing oligonucleotide probe library, which utilizes photo-cleavable (PC) Biotin (see, e.g., www.idtdna.com/site/Catalog/Modifications/Product/2291; references 1-4) and thus allows oligonucleotide probe detection using the Nanostring tag-capture system.

[1187] The steps of the purification of post-probing oligonucleotide probe library are shown in schematic 1700 in FIG. 17A and include the following: (i) modification of the 5′-end of each member of the oligonucleotide library with photocleavable-Biotin (PC-Biotin) 1701 via PCR with a PC-Biotinylated primer to create PC-Biotinylated aptamer library 1702; (ii) probing of plasma samples using the PC-Biotinyltated oligonucleotide probe library followed by PEG precipitation as described herein, resulting in a pellet 1703 which contains, inter alia, bound oligonucleotide library members, proteins and microvesicles 1705, and PEG; (iii) heat denaturing of the re-suspended pellet to break oligonucleotide/protein interactions and make PEG less viscous before mixing with streptavidin beads 1704; (iv) after short incubation with streptavidin beads 1704 to allow library 1702 to bind to the beads 1706, washing of the beads to remove impurities; (v) UV photo-cleavage 1707 of the spacer between the PC-Biotin and oligonucleotide molecules, capturing the beads 1708 using a magnet and collecting the released oligonucleotide library 1709 in the solution; and (vi) Nanostring 1710 sample preparation according to the manufacturer's instructions. In FIG. 17A, “PCB” refers to photocleavable biotin, oligonucleotide library members are referred to as “AL,” “Str. Beads” refers to streptavidin beads, and “NS” refers to the Nanostring assay. The steps above are identified in the plot.

[1188] FIG. 17B show a 4% agarose gel with results of photocleavable biotin library cleavage test with Streptavidin protein. Lane 1 is a 50 bp DNA ladder and lane 10 is a Control with no biotin library with Streptavidin protein. The gel shows that both biotinylated (“B”) and photo-cleavable biotinylated (“PC-B”) modified oligonucleotides were bound to Streptavidin, which resulted in slower mobility in gel (lanes 4 and 5) as compared to the unbound oligonucleotides (lanes 2 and 3). After exposure to 365 nm UV radiation, the PC-B oligonucleotides were photo-cleaved, which resulted in faster mobility in gel and returning to the original molecular weight (i.e., before mixing with Streptavidin protein) (lanes 7-9, where minutes UV exposure are indicated). In contrast, no change to the B oligonucleotides was observed after 10 min exposure to UV (lane 8). These results demonstrate that the photocleavable biotin library can be captured by streptavidin beads and released by UV-mediated cleavage.

[1189] To test the workflow, a pool of plasma from patients with breast cancer and another pool of plasma from healthy donors were probed with an oligonucleotide library comprising 100 oligonucleotide probes, 50 of which were selected as cancer specific and other 50 were selected as equivalent binders to both types of samples (i.e., “neutral”). The Nanostring probe system 1720 was designed as in FIG. 17C. See FIG. 14G and description thereof for further details of the Nanostring probe system. The “Nanostring Probe A” 1722 and “Nanostring Probe B” 1727 were designed in part as reverse complements to the oligonucleotide probe library members of the invention (labeled “Aptamer” 1724 in the figure). As can be seen in FIGS. 17D-E, relevant Nanostring counts were obtained for the photocleavable oligonucleotide library (min relevant count is 300). Furthermore, the oligonucleotide probes selected as binders (“Binder”) for the cancer pool (“CP”), indeed show stronger binding to the cancer pool as compared to counts from healthy pool (“HP”). The binding ratio between cancers and normal was ˜5.25. For oligonucleotide probes selected as neutral binders (“Neutral”), there was no relevant difference between the cancer pool and healthy pool.

[1190] The Nanostring protocol uses hybridization of target specific probes. We tested 100 different oligonucleotide probes, which are complementary to portion of each specific oligonucleotide, as well as universal Primer probe for Nanostring detection using the above procedure. Following the standard Nanostring detection protocol, all probes were mixed with recovered and purified library, hybridized overnight and efficiently detected using the Nanostring tag-capture probe approach. In contrast, without purification no quantification of oligonucleotides with Nanostring was observed (data not shown).

[1191] In this Example, we established a process for oligonucleotide probe library purification after probing test samples. This process is efficient, low cost, can be accomplished in short time frame, and can be used for any purpose when library needs to be purified from probing product directly and quickly, given no biotin labeling is needed in downstream applications.

### REFERENCES

[1192] 1. Photocleavable biotin derivatives: a versatile approach for the isolation of biomolecules. Proc Natl Acad Sci USA. 1995, 16, 7590-7594.
[1193] 2. Photocleavable biotin phosphoramidite for 5′-end-labeling, affinity purification and phosphorylation of synthetic oligonucleotides. Nucleic Acids Res. 1996, 2, 361-366.
[1194] 3. Photocleavable affinity tags for isolation and detection of biomolecules. Methods Enzymol. 1998, 291, 135-154.
[1195] 4. Matrix-assisted laser desorption/ionization mass spectrometry of DNA using photocleavable biotin. Biomol Eng. 1999, 16, 127-133.

### Example 34: Single Stranded DNA (ssDNA) Oligonucleotide Library Preparation for Library Development

[1196] The preparation of high yield and high quality ssDNA libraries is a critical step in SELEX (Systematic Evolution of Ligands by EXponential enrichment) [1, 2] as well as in other biological applications, such as DNA chips and microarrays [3], and single-stranded conformation polymorphism technique (SSCP) [4]. The standard approach for preparing ssDNA libraries includes PCR amplification to first generate a double stranded (dsDNA) library, followed by ssDNA separation and purification. Several strategies of ssDNA preparation have been developed to date, each with advantages and disadvantages:

[1197] Lambda Exonuclease Digestion [2, 5-7]

[1198] The dsDNA standard PCR product is followed by Lambda exonuclease to digest the complementary strand and leave the target ssDNA. ssDNA purification is then performed to remove enzymes and unwanted buffer.

[1199] Advantages:

[1200] Regular PCR amplification has high yield in generating dsDNA.

[1201] Disadvantages:

[1202] The purity of final ssDNA is limited by enzyme digestion efficiency. Also dsDNA needs to be purified prior to digestion, together with post-digestion purification there will be two purifications, which results in substantial loss of input material. The digestion usually requires at least 2 hours. The digestion rate may not be consistent.

[1203] Asymmetric PCR [8, 9]

[1204] The procedure generates target ssDNA as the main product and less dsDNA products and non-target ssDNA. The band corresponding to the target ssDNA is cut from a native gel.

[1205] Advantages:

[1206] The final ssDNA product potentially has high purity.

[1207] Disadvantages:

[1208] Separation of strands is possible in the native gel, but the yield is typically low and the presence of non-target strand cannot be excluded. The yield cannot be increased on denaturing gel because the strands have the same length.

[1209] Biotin-Streptavidin Magnetic Beads Separation [10, 11]

[1210] The non-target PCR primer is biotinylated so final PCR products are Biotinylated-dsDNA, which can be captured by streptavidin magnetic beads and denatured to release the non-biotin labeled target ssDNA.

[1211] Advantages:

[1212] The final ssDNA product has relatively high purity.

[1213] Disadvantages:

[1214] In most cases, the input library needs to be biotinylated, but it may be difficult to replace or release the captured target strands from streptavidin beads. Post-denaturing purification is required to remove NaOH and/or acid used for neutralization.

[1215] Unequal Primer Length PCR [12]

[1216] The non-target PCR primer has a chemical modified spacer and a few extra nucleotides following. In the PCR reaction, the DNA polymerase will stop at the spacer, resulting in unequal length of PCR dsDNA product. Then target ssDNA can be cut from a denaturing PAGE gel.

[1217] Advantages:

[1218] The final ssDNA product has high purity because the target ssDNA is not mixed with non-target strands.

[1219] Disadvantages:

[1220] ssDNA cannot be seen on native gel. Requires time consuming denaturing PAGE gel. It may be difficult to denature some dsDNA library, which can limit the final yield.

[1221] Indirect Purification Method [13]

[1222] The indirect purification strategy combines Asymmetric PCR and Biotin-streptavidin magnetic beads separation. In short, regular PCR is used to generate sufficient template, then asymmetric PCR with excess of target primer and less biotinylated complementary primers, followed by biotin-streptavidin separation.

[1223] Advantages:

[1224] May increase yield and purity of ssDNA product.

[1225] Disadvantages:

[1226] It cannot produce biotinylated target ssDNA library. The process is relatively long and complicated and may be prone to generate mutants of the original sequence.

[1227] The invention provides methods of enriching oligonucleotide probe libraries against a target of interest. As the probes comprise ssDNA, the process may comprise PCR amplification then conversion back into ssDNA after each round of enrichment. In this Example, we developed a strategy for preparation of a ssDNA oligonucleotide library. The goals were to develop a process that is efficient and quick, while delivering high quality/purity ssDNA. We aimed to combine PCR and ssDNA prep in one step, remain efficient in the presence of selection buffer, target molecules, other sample components (e.g., highly abundant proteins for plasma samples) and other assay components (e.g., PEG precipitation solution that may be used to precipitate microvesicles). In addition, we desired the method to be able to generate ssDNA library with any modification, including without limitation Biotin.

[1228] We have used an optimized version of Lambda exonuclease digestion protocol for preparation of ssDNA oligonucleotide library. However, the digestion yield limits the overall recovery and is not consistent between different library preparations. In some cases, the ssDNA band is hardly visible on the gel following digestion. We have also observed incomplete digestion of dsDNA in the ssDNA product. In this Example, we developed an alternative protocol, termed “ssDNA by Unequal length PRimer Asymmetric PCR,” or SUPRA. It lacks disadvantages from the known methods listed above, and provides high quality and yield up to 10× higher yield of ssDNA oligonucleotide library as compared to the previous methods. It is relatively fast and convenient technically, since target ssDNA can be distinguished from non-target DNA on a gel.

[1229] A schematic comparing standard PCR 1800 and unequal length PCR 1810 is shown in FIG. 18A. In regular PCR 1800, a forward primer 1801 and reverse primer 1803 are hybridized with the reverse strand of an aptamer library 1802. The PCR reaction is performed, thereby creating equal length forward 1804 and reverse strands 1802. The strands are denatured in equal length single strands 1805. In unequal length PCR 1801, a forward primer 1811 having a lengthener segment and terminator segment and a reverse primer 1813 are hybridized with the reverse strand of an aptamer library 1812. The PCR reaction is performed, thereby creating unequal length forward 1814 and reverse strands 1812. The strands are denatured into unequal length single strands 1814 and 1812 that can be separated by size, e.g., on a denaturing gel.

[1230] The steps of SUPRA include: (i) Modification of regular non-target primer with two Isp9 (Internal Spacer 9; triethylene glycol spacer) as terminator and 32 extra nucleotides (e.g., poly-A) as lengthener. It is referred as Unequal-Forward-Double isp9 primer (UF-D9); (ii) Perform asymmetric PCR, by mixing DNA template, UF-D9 and regular target (reverse) primer at ratio that favors the reverse primer, e.g., 1:37.5. The PCR program has longer elongation step (e.g., 3 min instead of standard 1 min) and more cycles due to linear amplification mode (instead of exponential). The PCR product contains a majority of target ssDNA and small portion of dsDNA. (iii) Mix PCR reaction products 1:1 with denaturing buffer (e.g., 180 mM NaOH and 6 mM EDTA) and denature samples by heating (e.g., 70° C. for 10 min) and cooling (e.g., incubation on ice for 3 min); (iv) Run denatured products in denaturing buffer on an agarose gel stained with SybrGold. The non-target strand, which is longer due to the lengthener, will appear as upper band (if visible) and the target strand (strong lower band) is cut and purified. The process can include optional steps, including without limitation: (v) Weigh the gel pieces and purify ssDNA from the gel pieces (e.g., using the ssDNA Nucleospin kit or the like); (vi) quantification of the yield and native gel can be used to check the purity and yield of final product (e.g., using the ssDNA Qubit kit or the like).

[1231] The first step (i) uses a specific design of the forward primer with efficient terminator and lengthener, which creates non-target strand of unequal length. The DNA polymerase used to build the target strand will stop polymerization once it reaches the terminator, and the lengthener facilitates differentiation between the target and non-target strands. In the second step (ii), the ratio between the two primers is shifted toward the reverse primer, to produce a majority of target ssDNA. The ratio, however, should not limit double strand templates production to keep reaction running. FIG. 18B is a gel showing titration of forward and reverse primers input in asymmetrical PCR. The optimal condition, at which target strand is clearly visible, is in the range 1:20-1:50 F:R primers ratio. As shown in the figure, the ratio between two primers in asymmetric PCR can affect dsDNA and ssDNA amount in final products. The PCR thermocycler program is also adjusted to provide efficiency in the asymmetric PCR. In the third step (iii), a reliable denaturing method is used to separate target ssDNA to ensure the final yield and high purity.

[1232] As desired, the final step (vi) estimates the ratio of residual dsDNA, e.g., using ssDNA Qubit kit. In cases where the yield is not critical, the denaturing steps (iii and iv) can be skipped and the PCR products can be directly run on native gel. There will be a dsDNA band, but lower MW target ssDNA band can be distinguished and purified from gel. This is also a way to visualize the target band directly after PCR for a quality check or purification without denaturing. The purity of final product will be the same but yield will be lower.

[1233] A comparison of native versus denatured gel purification is shown in FIG. 18C. A post-probing oligonucleotide probe library was PCRed using unequal length primers mixed at a ratio of 1:38 (Forward/Reverse). In the figure, the left lane on each gel is a 50 bp molecular weight ladder and the lower band is the reverse primer. The positions of the dsDNA and ss DNA are indicated. A native gel showed the presence of both dsDNA and ssDNA (target strand) (FIG. 18C, panel A). Here, part of the target reverse strand is migrating in dsDNA. Thus, using the native gel, one can purify target ssDNA with moderate recovery. When a higher yield is desired, the PCR products can be run on denaturing agarose gel as described above. This approach provides maximal recovery wherein only target strand is visible, and can be cut from gel and purified (FIG. 18C, panel B). In this case, the reverse strand ssDNA, which is part of the dsDNA on native gel (FIG. 18C, panel A), is denatured and migrates together with other free molecules of target ssDNA strand, while forward strand becomes invisible due to limited amplification.

[1234] Compared to standard asymmetric PCR, which has relatively low yield and does not allow to distinguish target and non-target strands on denaturing gel, SUPRA delivers different lengths of target and non-target that can be purified on both native gel and denaturing gels. Compared to unequal primer length PCR, which uses lengthy Urea-PAGE protocol and produces only dsDNA, SUPRA has less dsDNA and free target ssDNA can be cut even from native gel if yield is not critical.

[1235] SUPRA has been used in the oligonucleotide probe library enrichment methods provided by the invention. The method is robust. In the presence of enrichment buffer, target/non-target molecules, proteins, exosomes/microvesicles, PEG and other components, SUPRA provides high quality and quantity of the ssDNA oligonucleotide library.

### REFERENCES

[1236] 1. Comparison of different methods for generation of single-stranded DNA for SELEX processes. Anal. Bioanal. Chem. 2012, 404, 835-842.
[1237] 2. Upgrading SELEX Technology by Using Lambda Exonuclease Digestion for Single-Stranded DNA Generation. Molecules 2010, 15, 1-11.
[1238] 3. Tang, K.; Fu, D. J.; Julien, D.; Braun, A.; Cantor, C. R.; Koster, H. Chip-based genotyping by mass spectrometry. Proc. Natl. Acad. Sci. USA 1999, 96, 10016-10020.
[1239] 4. Kuypers, A. W.; Linssen, P. C.; Willems, P. M.; Mensink, E. J. On-line melting of double-stranded DNA for analysis of single-stranded DNA using capillary electrophoresis. J. Chromatogr. B Biomed. Appl. 1996, 675, 205-211.
[1240] 5. Higuchi, R. G.; Ochman, H. Production of single-stranded DNA templates by exonuclease digestion following the polymerase chain reaction. Nucleic Acids Res. 1989, 17, 5865.
[1241] 6. Jones, L. A.; Clancy, L. E.; Rawlinson, W. D.; White, P. A. High-affinity aptamers to subtype 3a hepatitis C virus polymerase display genotypic specificity. Antimicrob. Agents Chemother. 2006, 50, 3019-3027.
[1242] 7. S. S. Oh, K. Ahmads, M. Cho, Y. Xiao, H. T. Soh, “Rapid, Efficient Aptamer Generation: Kinetic-Challenge Microfluidic SELEX,” presented in the 12th Annual UC Systemwide Bioengineering Symposium, Jun. 13-15, 2011, Santa Barbara, U.S.A.
[1243] 8. Gyllensten, U. B.; Erlich, H. A. Generation of single-stranded DNA by the polymerase chain reaction and its application to direct sequencing of the HLA-DQA locus. Proc. Natl. Acad. Sci. USA 1988, 85, 7652-7656.
[1244] 9. Wu, L.; Curran, J. F. An allosteric synthetic DNA. Nucleic Acids Res. 1999, 27, 1512-1516.
[1245] 10. Espelund, M.; Stacy, R. A.; Jakobsen, K. S. A simple method for generating single-stranded DNA probes labeled to high activities. Nucleic Acids Res. 1990, 18, 6157-6158.
[1246] 11. A. Paul, M. Avci-Adali, G. Ziemer, H. P. Wendel. Streptavidin-coated magnetic beads for DNA strand separation implicate a multitude of problems during cell-SELEX. Oligonucleotides 2009, 19, 243-254.
[1247] 12. Williams K., Bartel D. PCR product with strands of unequal length. Nucleic Acids Research, 1995, Vol. 23, No. 20.
[1248] 13. Indirect purification method provides high yield and quality ssDNA sublibrary for potential aptamer selection. Anal. Biochem. 2015, online available.

[1249] Although preferred embodiments of the present invention have been shown and described herein, it will be obvious to those skilled in the art that such embodiments are provided by way of example only. Numerous variations, changes, and substitutions will now occur to those skilled in the art without departing from the invention. It should be understood that various alternatives to the embodiments of the invention described herein may be employed in practicing the invention. It is intended that the following claims define the scope of the invention and that methods and structures within the scope of these claims and their equivalents be covered thereby.

What is claimed is:

1. An oligonucleotide comprising a sequence according to any one of SEQ ID NOs 137-969 and 1072-4150.

2. An oligonucleotide comprising a sequence according to any one of the SEQ ID NOs in Table 40.

3. An oligonucleotide comprising a sequence according to any one of the SEQ ID NOs in the row “2000v1” in Table 43.

4. An oligonucleotide comprising a sequence according to any one of the SEQ ID NOs in the row “2000v2” in Table 43.

5. An oligonucleotide comprising a sequence according to any one of the SEQ ID NOs in the row “Common” in Table 43.

6. An oligonucleotide comprising a sequence according to any one of the SEQ ID NOs in any preceding claim and further having a 5′ region with sequence 5′-CTAGCATGACTGCAGTACGT (SEQ ID NO. 131) and/or a 3′ region with sequence 5′-CTGTCTCTTATACACATCTGACGCTGCCGACGA (SEQ ID NO. 132).

7. An oligonucleotide comprising a nucleic acid sequence or a portion thereof that is at least 50, 55, 60, 65, 70, 75, 80, 85, 90, 95, 96, 97, 98, 99 or 100 percent homologous to an oligonucleotide sequence according to any preceding claim.

8. A plurality of oligonucleotides comprising at least 1, 2, 3, 4, 5, 6, 7, 8, 9, 10, 11, 12, 13, 14, 15, 16, 17, 18, 19, 20, 25, 30, 40, 45, 50, 55, 60, 65, 70, 75, 80, 85, 90, 95, 100, 125, 150, 175, 200, 300, 400, 500, 600, 700, 800, 900, 1000, 2000, 3000, 4000, 5000, 6000, 7000, 8000, 9000, or at least 10000 different oligonucleotide sequences according to claim 7.

9. A plurality of oligonucleotides comprising at least 1, 2, 3, 4, 5, 6, 7, 8, 9, 10, 11, 12, 13, 14, 15, 16, 17, 18, 19, 20, 25, 30, 40, 45, 50, 55, 60, 65, 70, 75, 80, 85, 90, 95, 100, 125, 150, 175, 200, 300, 400, 500, 600, 700, 800, 900, 1000, 1500, 2000, 2500, 3000, 3500, 4000, or all sequences according to SEQ ID NOs 137-969 and 1072-4150.

10. The plurality of oligonucleotides of claim 9, comprising at least 1, 2, 3, 4, 5, 6, 7, 8, 9, 10, 11, 12, 13, 14, 15, 16, 17, 18, 19, 20, 25, 30, 40, 45, 50, 55, 60, 65, 70, 75, or all SEQ ID NOs listed in Table 40.

11. The plurality of oligonucleotides of claim 10, comprising at least the first 1, 2, 3, 4, 5, 6, 7, 8, 9, 10, 11, 12, 13, 14, 15, 16, 17, 18, 19, 20, 25, 30, 40, 45, 50, 55, 60, 65, 70, 75, or all SEQ ID NOs listed in Table 40.

12. The plurality of oligonucleotides of claim 9, comprising at least 1, 2, 3, 4, 5, 6, 7, 8, 9, 10, 11, 12, 13, 14, 15, 16, 17, 18, 19, 20, 25, 30, 40, 45, 50, 55, 60, 65, 70, 75, 80, 85, 90, 95, 100, 125, 150, 175, 200, 225, 250, 275, 300, or all SEQ ID NOs listed in row “2000v1” of Table 43.

13. The plurality of oligonucleotides of claim 12, comprising at least the first 1, 2, 3, 4, 5, 6, 7, 8, 9, 10, 11, 12, 13, 14, 15, 16, 17, 18, 19, 20, 25, 30, 40, 45, 50, 55, 60, 65, 70, 75, 80, 85, 90, 95, 100, 125, 150, 175, 200, 225, 250, 275, 300, or all SEQ ID NOs listed in row “2000v1” of Table 43.

14. The plurality of oligonucleotides of claim 9, comprising at least 1, 2, 3, 4, 5, 6, 7, 8, 9, 10, 11, 12, 13, 14, 15, 16, 17, 18, 19, 20, 25, 30, 40, 45, 50, 55, 60, 65, 70, 75, 80, 85, 90, 95, 100, 105, 110, 115, 120, 125, 130, 135, 140, 145 or all SEQ ID NOs listed in row “2000v2” of Table 43.

15. The plurality of oligonucleotides of claim 14, comprising at least the first 1, 2, 3, 4, 5, 6, 7, 8, 9, 10, 11, 12, 13, 14, 15, 16, 17, 18, 19, 20, 25, 30, 40, 45, 50, 55, 60, 65, 70, 75, 80, 85, 90, 95, 100, 105, 110, 115, 120, 125, 130, 135, 140, 145 or all SEQ ID NOs listed in row “2000v2” of Table 43.

16. The plurality of oligonucleotides of claim 9, comprising at least 1, 2, 3, 4, 5, 6, 7, 8, 9, 10, 11, 12, 13, 14, 15, 16, 17 or all SEQ ID NOs listed in row “Common” of Table 43.

17. The plurality of oligonucleotides of claim 16, comprising at least the first 1, 2, 3, 4, 5, 6, 7, 8, 9, 10, 11, 12, 13, 14, 15, 16, 17 or all SEQ ID NOs listed in row “Common” of Table 43.

18. An oligonucleotide or plurality of oligonucleotides according to any preceding claim, wherein the oligonucleotide or at least one member of the plurality of oligonucleotides comprises at least one functional modification selected from the group consisting of DNA, RNA, biotinylation, a non-naturally occurring nucleotides, a deletion, an insertion, an addition, and a chemical modification.

19. A method of characterizing a phenotype in a sample comprising:
(a) contacting the sample with at least one oligonucleotide or plurality of oligonucleotides according to any preceding claim; and
(b) identifying a presence or level of a complex formed between the at least one oligonucleotide or plurality of oligonucleotides and the sample, wherein the presence or level is used to characterize the phenotype.

20. The method of claim 19, wherein the identifying comprises sequencing, amplification, hybridization, gel electrophoresis or chromatography.

21. The method of claim 20, wherein the identifying by hybridization comprises contacting the sample with at least one labeled probe that is configured to hybridize with at least one oligonucleotide.

22. The method of claim 21, wherein the at least one labeled probe is directly or indirectly attached to a label.

23. The method of claim 22, wherein the label comprises a fluorescent or magnetic label.

24. The method of claim 20, wherein the sequencing comprises next generation sequencing, dye termination sequencing, and/or pyrosequencing.

25. A method of detecting at least one oligonucleotide in a sample, comprising:
(a) providing the at least one oligonucleotide comprising a capture moiety;
(b) contacting the sample with the at least one oligonucleotide provided in (a);
(c) capturing the at least one oligonucleotide that formed a complex with a component in the sample in (b);
(d) identifying a presence or level of the at least one oligonucleotide captured in (c), wherein optionally the presence or level is used to characterize a phenotype.

26. The method of claim 25, wherein the at least one oligonucleotide is captured to a substrate.

27. The method of claim 26, wherein the substrate comprises a bead or planar substrate.

28. The method of any of claims 25-27, wherein the capture moiety comprises biotin.

29. The method of any of claims 25-28, wherein the capture moiety is photocleavable.

30. The method of claim 28 or 29, wherein the at least one oligonucleotide is captured to a substrate comprising avidin or streptavidin.

31. The method of claim 30 as depends from claim 29, wherein the captured at least one oligonucleotide is released from the substrate by irradiation prior to the identifying.

32. The method of any of claims 25-31, wherein the identifying comprises sequencing, amplification, hybridization, gel electrophoresis or chromatography.

33. The method of claim 32, wherein the detection by hybridization comprises contacting the sample with at least one labeled probe that is configured to hybridize with at least one oligonucleotide.

34. The method of claim 33, wherein the at least one labeled probe is directly or indirectly attached to a label.

35. The method of claim 34, wherein the label comprises a fluorescent or magnetic label.

36. The method of claim 32, wherein the sequencing comprises next generation sequencing, dye termination sequencing, and/or pyrosequencing.

37. The method of any one of claims 19-36, wherein the at least one oligonucleotide comprises an oligonucleotide or plurality of oligonucleotides according to any one of claims 1-18.

38. The method of any one of claims 19-37, wherein the phenotype comprises a disease or disorder.

39. The method of claim 38, wherein the characterizing comprises a diagnosis, prognosis and/or theranosis for the disease or disorder.

40. The method of claim 39, wherein the theranosis comprises predicting a treatment efficacy or lack thereof, or monitoring a treatment efficacy.

41. The method of any one of claims 19-40, wherein the complex formed between the at least one oligonucleotide or plurality of oligonucleotides and the sample comprises a complex formed between a microvesicle population in the sample and the at least one oligonucleotide or plurality of oligonucleotides.

42. The method of claim 41, wherein the microvesicle population is isolated before of after the contacting using affinity purification, filtration, polymer precipitation, PEG precipitation, ultracentrifugation, a molecular crowding reagent, affinity isolation, affinity selection, or any combination thereof.

43. The method of any one of claims 19-42 wherein the characterizing comprises comparing the presence or level to a reference.

44. The method of claim 43, wherein the reference comprises the presence or level determined in a sample from an individual without a disease or disorder, or from an individual with a different state of a disease or disorder.

45. The method of claim 43 or 44, wherein the comparison to the reference of at least one oligonucleotide comprising a SEQ ID NO in any one of claims 1-7 indicates that the sample comprises a cancer sample or a non-cancer/normal sample.

46. The method of any one of claims 19-45, wherein the sample comprises a bodily fluid, tissue sample or cell culture.

47. The method of claim 46, wherein the bodily fluid comprises peripheral blood, sera, plasma, ascites, urine, cerebrospinal fluid (CSF), sputum, saliva, bone marrow, synovial fluid, aqueous humor, amniotic fluid, cerumen, breast milk, broncheoalveolar lavage fluid, semen, prostatic fluid, cowper's fluid or pre-ejaculatory fluid, female ejaculate, sweat, fecal matter, hair oil, tears, cyst fluid, pleural and peritoneal fluid, pericardial fluid, lymph, chyme, chyle, bile, interstitial fluid, menses, pus, sebum, vomit, vaginal secretions, mucosal secretion, stool water, pancreatic juice, lavage fluids from sinus cavities, bronchopulmonary aspirates, blastocyl cavity fluid, or umbilical cord blood.

48. The method any one of claims 19-47, wherein the sample is from a subject suspected of having or being predisposed to a disease or disorder.

49. The method of any of claims 25-48, wherein the disease or disorder comprises a cancer, a premalignant condition, an inflammatory disease, an immune disease, an autoimmune disease or disorder, a cardiovascular disease or disorder, neurological disease or disorder, infectious disease or pain.

50. The method of claim 49, wherein the cancer comprises an acute lymphoblastic leukemia; acute myeloid leukemia; adrenocortical carcinoma; AIDS-related cancers; AIDS-related lymphoma; anal cancer; appendix cancer; astrocytomas; atypical teratoid/rhabdoid tumor; basal cell carcinoma; bladder cancer; brain stem glioma; brain tumor (including brain stem glioma, central nervous system atypical teratoid/rhabdoid tumor, central nervous system embryonal tumors, astrocytomas, craniopharyngioma, ependymoblastoma, ependymoma, medulloblastoma, medulloepithelioma, pineal parenchymal tumors of intermediate differentiation, supratentorial primitive neuroectodermal tumors and pineoblastoma); breast cancer; bronchial tumors; Burkitt lymphoma; cancer of unknown primary site; carcinoid tumor; carcinoma of unknown primary site; central nervous system atypical teratoid/rhabdoid tumor; central nervous system embryonal tumors; cervical cancer; childhood cancers; chordoma; chronic lymphocytic leukemia; chronic myelogenous leukemia; chronic myeloproliferative disorders; colon cancer; colorectal cancer; craniopharyngioma; cutaneous T-cell lymphoma; endocrine pancreas islet cell tumors; endometrial cancer; ependymoblastoma; ependymoma; esophageal cancer; esthesioneuroblastoma; Ewing sarcoma; extracranial germ cell tumor; extragonadal germ cell tumor; extrahepatic bile duct cancer; gallbladder cancer; gastric (stomach) cancer; gastrointestinal carcinoid tumor; gastrointestinal stromal cell tumor; gastrointestinal stromal tumor (GIST); gestational trophoblastic tumor; glioma; hairy cell leukemia; head and neck cancer; heart cancer; Hodgkin lymphoma; hypopharyngeal cancer; intraocular melanoma; islet cell tumors; Kaposi sarcoma; kidney cancer; Langerhans cell histiocytosis; laryngeal cancer; lip cancer; liver cancer; lung cancer; malignant fibrous histiocytoma bone cancer; medulloblastoma; medulloepithelioma; melanoma; Merkel cell carcinoma; Merkel cell skin carcinoma; mesothelioma; metastatic squamous neck cancer with occult primary; mouth cancer; multiple endocrine neoplasia syndromes; multiple myeloma; multiple myeloma/plasma cell neoplasm; mycosis fungoides; myelodysplastic syndromes; myeloproliferative neoplasms; nasal cavity cancer; nasopharyngeal cancer; neuroblastoma; Non-Hodgkin lymphoma; nonmelanoma skin cancer; non-small cell lung cancer; oral cancer; oral cavity cancer; oropharyngeal cancer; osteosarcoma; other brain and spinal cord tumors; ovarian cancer; ovarian epithelial cancer; ovarian germ cell tumor; ovarian low malignant potential tumor; pancreatic cancer; papillomatosis; paranasal sinus cancer; parathyroid cancer; pelvic cancer; penile cancer; pharyngeal cancer; pineal parenchymal tumors of intermediate differentiation; pineoblastoma; pituitary tumor; plasma cell neoplasm/multiple myeloma; pleuropulmonary blastoma; primary central nervous system (CNS) lymphoma; primary hepatocellular liver cancer; prostate cancer; rectal cancer; renal cancer; renal cell (kidney) cancer; renal cell cancer; respiratory tract cancer; retinoblastoma; rhabdomyosarcoma; salivary gland cancer; Sezary syndrome; small cell lung cancer; small intestine cancer; soft tissue sarcoma; squamous cell carcinoma; squamous neck cancer; stomach (gastric) cancer; supratentorial primitive neuroectodermal tumors; T-cell lymphoma; testicular cancer; throat cancer; thymic carcinoma; thymoma; thyroid cancer; transitional cell cancer; transitional cell cancer of the renal pelvis and ureter; trophoblastic tumor; ureter cancer; urethral cancer; uterine cancer; uterine sarcoma; vaginal cancer; vulvar cancer; Waldenstrom macroglobulinemia; or Wilm's tumor.

51. The method of claim 49, wherein the premalignant condition comprises Barrett's Esophagus.

52. The method of claim 49, wherein the autoimmune disease comprises inflammatory bowel disease (IBD), Crohn's disease (CD), ulcerative colitis (UC), pelvic inflammation, vasculitis, psoriasis, diabetes, autoimmune hepatitis, multiple sclerosis, myasthenia gravis, Type I diabetes, rheumatoid arthritis, psoriasis, systemic lupus erythematosis (SLE), Hashimoto's Thyroiditis, Grave's disease, Ankylosing Spondylitis Sjogrens Disease, CREST syndrome, Scleroderma, Rheumatic Disease, organ rejection, Primary Sclerosing Cholangitis, or sepsis.

53. The method of claim 49, wherein the cardiovascular disease comprises atherosclerosis, congestive heart failure, vulnerable plaque, stroke, ischemia, high blood pressure, stenosis, vessel occlusion or a thrombotic event.

54. The method of claim 49, wherein the neurological disease comprises Multiple Sclerosis (MS), Parkinson's Disease (PD), Alzheimer's Disease (AD), schizophrenia, bipolar disorder, depression, autism, Prion Disease, Pick's disease, dementia, Huntington disease (HD), Down's syndrome, cerebrovascular disease, Rasmussen's encephalitis, viral meningitis, neurospsychiatric systemic lupus erythematosus (NPSLE), amyotrophic lateral sclerosis, Creutzfeldt-Jacob disease, Gerstmann-Straussler-Scheinker disease, transmissible spongiform encephalopathy, ischemic reperfusion damage (e.g. stroke), brain trauma, microbial infection, or chronic fatigue syndrome.

55. The method of claim 49, wherein the pain comprises fibromyalgia, chronic neuropathic pain, or peripheral neuropathic pain.

56. The method of claim 49, wherein the infectious disease comprises a bacterial infection, viral infection, yeast infection, Whipple's Disease, Prion Disease, cirrhosis, methicillin-resistant staphylococcus aureus, HIV, HCV, hepatitis, syphilis, meningitis, malaria, tuberculosis, influenza.

57. A kit comprising a reagent for carrying out the method of any of claims 19-56.

58. Use of a reagent for carrying out the method of any of claims 19-56.

59. The kit of claim 57 or use of claim 58, wherein the reagent comprises an oligonucleotide or a plurality of oligonucleotides according to any one of claims 1-18.

60. A nucleic acid molecule comprising a 5′ leader region which is 5′ of a variable region, which is 5′ of a tail region, wherein the leader region comprises a lengthener region, a terminator region and a forward primer region, and the tail region comprises a reverse primer region.

61. The nucleic acid molecule of claim 60, wherein the lengthener region comprises at least 10, 11, 12, 13, 14, 15, 16, 17, 18, 19, 20, 21, 22, 23, 24, 25, 26, 27, 28, 29, 30, 31, 32, 33, 34, 35, 36, 37, 38, 39, 30, 41, 42, 43, 44, 45, 46, 47, 48, 49, or 50 nucleotides.

62. The nucleic acid molecule of claim 60 or 61, wherein the lengthener region comprises a poly-A sequence.

63. The nucleic acid molecule of claim 60, wherein the terminator region comprises at least 3, 4, 5, 6, 7, 8, 9, 10, 11, 12, 13, 14, 15, 16, 17, 18, 19, 20, 21, 22, 23, 24, 25, 26, 27, 28, 29, 30, 31, 32, 33, 34, 35, 36, 37, 38, 39, 30, 41, 42, 43, 44, 45, 46, 47, 48, 49, or 50 nucleotides.

64. The nucleic acid molecule of claim 60 or 63, wherein the terminator region comprises a non-nucleotide terminator.

65. The nucleic acid molecule of claim 64, wherein the non-nucleotide terminator comprises triethylene glycol.

66. The nucleic acid molecule of claim 60, wherein the forward primer region comprises at least 10, 11, 12, 13, 14, 15, 16, 17, 18, 19, 20, 21, 22, 23, 24, 25, 26, 27, 28, 29, 30, 31, 32, 33, 34, 35, 36, 37, 38, 39, 30, 41, 42, 43, 44, 45, 46, 47, 48, 49, or 50 nucleotides.

67. The nucleic acid molecule of claim 60, wherein the variable region comprises at least 10, 11, 12, 13, 14, 15, 16, 17, 18, 19, 20, 21, 22, 23, 24, 25, 26, 27, 28, 29, 30, 31, 32, 33, 34, 35, 36, 37, 38, 39, 30, 41, 42, 43, 44, 45, 46, 47, 48, 49, or 50 nucleotides.

68. The nucleic acid molecule of claim 67, wherein the variable region binds a target molecule or complex through non-Watson-Crick base pairing.

69. The nucleic acid molecule of claim 60, wherein the reverse primer region comprises at least 10, 11, 12, 13, 14, 15, 16, 17, 18, 19, 20, 21, 22, 23, 24, 25, 26, 27, 28, 29, 30, 31, 32, 33, 34, 35, 36, 37, 38, 39, 30, 41, 42, 43, 44, 45, 46, 47, 48, 49, or 50 nucleotides.

70. A method of generating a single-stranded DNA (ssDNA) molecule comprising:
(a) providing a mixture comprising a nucleic acid molecule according to any one or all of claims 60-69, and forward and reverse primers configured to amplify the nucleic acid molecule from the forward primer region and reverse primer region, respectively; and
(b) performing asymmetric polymerase chain reaction (PCR) on the mixture in a) to favorably amplify the reverse strand of the nucleic acid molecule, wherein the forward and reverse primers in the mixture are at a ratio of at least about 1:5 (F/R) in favor of the reverse primers; thereby generating the ssDNA molecule.

71. The method of claim 70, wherein the ratio is between about 1:20-1:50 (F/R) in favor of the reverse primers.

72. The method of claim 70, wherein the ratio is between about 1:37.5 (F/R) in favor of the reverse primers.

73. The method of claim 70, further comprising isolating the amplified reverse strand of the nucleic acid molecule on a native gel.

74. The method of any one of claims 70-72, further comprising:
(c) denaturing the amplified nucleic acid molecules from b); and
(d) isolating the denatured reverse strand of the nucleic acid molecules from c).

75. The method of claim 74, wherein the denatured reverse strand of the nucleic acid molecules is isolated on a denaturing gel.

76. The method of any of claims 70-75, wherein the mixture in a) further comprises at least one of an enrichment buffer, non-target molecules, proteins, microvesicles, and polyethyleve glycol.

77. A kit comprising a reagent for carrying out the method of any of claims 70-76.

78. Use of a reagent for carrying out the method of any of claims 70-76.

79. The kit of claim 77 or use of claim 78, wherein the reagent comprises at least one of a buffer, a nucleic acid molecule or a plurality of nucleic acid molecules according to any one of claims 60-69, and forward and/or reverse primers configured to amplify the nucleic acid molecule or a plurality of nucleic acid molecules.

The application's sequence listing, which the Patent Office published only in electronic form, follows.

SEQUENCE LISTING (4150 sequences)

SEQ ID NO: 1 - DNA, 32 bp, Artificial Sequence
  Synthetic oligonucleotide
ccccccgaatcacatgacttgggcgggggtcg

SEQ ID NO: 2 - DNA, 32 bp, Artificial Sequence
  Synthetic oligonucleotide
accggatagcggttggaggcgtgctccactcg

SEQ ID NO: 3 - DNA, 32 bp, Artificial Sequence
  Synthetic oligonucleotide
ccgcgcagatatacaacgtacctctgtgcgca

SEQ ID NO: 4 - DNA, 70 bp, Artificial Sequence
  Synthetic oligonucleotide
atccagagtgacgcagcagtcttttctgatggacacgtggtggtctagtatctggacacggtggcttagt

SEQ ID NO: 5 - RNA, 70 nt, Artificial Sequence
  Synthetic oligonucleotide
auccagagugacgcagcagucuuuucugauggacacgugguggucuaguaucacuaagccaccgugucca

SEQ ID NO: 6 - DNA, 32 bp, Artificial Sequence
  Synthetic oligonucleotide
ctgtgaggcgtactgcggtgagcctctcatta

SEQ ID NO: 7 - DNA, 26 bp, Artificial Sequence
  Synthetic oligonucleotide
caattgggcccgtccgtatggtgggt

SEQ ID NO: 8 - RNA, 80 nt, Artificial Sequence
  Synthetic oligonucleotide
  site 15..55: n = a, g, c, t/u, unknown or other
gggaggacgaugcggnnnnnnnnnnnnnnnnnnnnnnnnnnnnnnnnnnnnnnnncagacgacucgcugaggauccgaga

SEQ ID NO: 9 - RNA, 15 nt, Artificial Sequence
  Synthetic oligonucleotide
gggaggacgaugcgg

SEQ ID NO: 10 - RNA, 25 nt, Artificial Sequence
  Synthetic oligonucleotide
cagacgacucgcugaggauccgaga

SEQ ID NO: 11 - RNA, 40 nt, Artificial Sequence
  Synthetic oligonucleotide
cgcgucuuccccgcauugccgcaauugccauacauuaaua

SEQ ID NO: 12 - DNA, 40 bp, Artificial Sequence
  Synthetic oligonucleotide
cgcgtcttccccgcattgccgcaattgccatacattaata

SEQ ID NO: 13 - RNA, 40 nt, Artificial Sequence
  Synthetic oligonucleotide
guccggaacgccucgauccucgcauaauaugauacgucug

SEQ ID NO: 14 - DNA, 40 bp, Artificial Sequence
  Synthetic oligonucleotide
gtccggaacgcctcgatcctcgcataatatgatacgtctg

SEQ ID NO: 15 - RNA, 40 nt, Artificial Sequence
  Synthetic oligonucleotide
guccaugguacgccucgauuccgcccauacaugcauguaa

SEQ ID NO: 16 - DNA, 40 bp, Artificial Sequence
  Synthetic oligonucleotide
gtccatggtacgcctcgattccgcccatacatgcatgtaa

SEQ ID NO: 17 - RNA, 40 nt, Artificial Sequence
  Synthetic oligonucleotide
cacuauccguuuguccguccucuugugguauugcgcaugc

SEQ ID NO: 18 - DNA, 40 bp, Artificial Sequence
  Synthetic oligonucleotide
cactatccgtttgtccgtcctcttgtggtattgcgcatgc

SEQ ID NO: 19 - RNA, 40 nt, Artificial Sequence
  Synthetic oligonucleotide
ucuuccaucuggucgcgauacagaauacgauuaacauaaa

SEQ ID NO: 20 - DNA, 40 bp, Artificial Sequence
  Synthetic oligonucleotide
tcttccatctggtcgcgatacagaatacgattaacataaa

SEQ ID NO: 21 - RNA, 40 nt, Artificial Sequence
  Synthetic oligonucleotide
gaucacgcugcccuuuguuuaaggccuuuauacaaacgca

SEQ ID NO: 22 - DNA, 40 bp, Artificial Sequence
  Synthetic oligonucleotide
gatcacgctgccctttgtttaaggcctttatacaaacgca

SEQ ID NO: 23 - RNA, 40 nt, Artificial Sequence
  Synthetic oligonucleotide
uauucgccagucacaucaacuaugaugacgcuugacugga

SEQ ID NO: 24 - DNA, 40 bp, Artificial Sequence
  Synthetic oligonucleotide
tattcgccagtcacatcaactatgatgacgcttgactgga

SEQ ID NO: 25 - RNA, 40 nt, Artificial Sequence
  Synthetic oligonucleotide
uaccgccucaucaucggacacgacguguaucaguuggcug

SEQ ID NO: 26 - RNA, 40 nt, Artificial Sequence
  Synthetic oligonucleotide
guucucgccucuguccucaugguucgaaccgguaugcaug

SEQ ID NO: 27 - RNA, 40 nt, Artificial Sequence
  Synthetic oligonucleotide
gcgguuucuucuccugacuacaugagauuaauaaacgcgc

SEQ ID NO: 28 - RNA, 40 nt, Artificial Sequence
  Synthetic oligonucleotide
ccgccucgaacacugacgucguggaaccuucgauugcuag

SEQ ID NO: 29 - RNA, 40 nt, Artificial Sequence
  Synthetic oligonucleotide
aaucacaguaauucugccccucugaugaaaccgguuacuu

SEQ ID NO: 30 - RNA, 40 nt, Artificial Sequence
  Synthetic oligonucleotide
cuuagugauuucgccgccccucuguuuaguggccauugga

SEQ ID NO: 31 - RNA, 40 nt, Artificial Sequence
  Synthetic oligonucleotide
acacuauuccgguaagucaucguuuaaccguuuguugcaa

SEQ ID NO: 32 - RNA, 40 nt, Artificial Sequence
  Synthetic oligonucleotide
ugcgcaacgccuugauucacuccuacagugugucuauaga

SEQ ID NO: 33 - RNA, 40 nt, Artificial Sequence
  Synthetic oligonucleotide
aauguuaagcuuacauacgccugggucacucuuuguucug

SEQ ID NO: 34 - RNA, 40 nt, Artificial Sequence
  Synthetic oligonucleotide
guaaauauucacguugaaucgccuugcuccucuuagucug

SEQ ID NO: 35 - RNA, 40 nt, Artificial Sequence
  Synthetic oligonucleotide
ccgccucggaucguucccaauggugguaccccuauuaaug

SEQ ID NO: 36 - RNA, 40 nt, Artificial Sequence
  Synthetic oligonucleotide
uguagaucguucuuauccgccucggucuuccccagguuaa

SEQ ID NO: 37 - RNA, 40 nt, Artificial Sequence
  Synthetic oligonucleotide
aucgucgggccccuuuuaugaaacuuacaugaaagcgcac

SEQ ID NO: 38 - RNA, 40 nt, Artificial Sequence
  Synthetic oligonucleotide
uaagagugcacaguacugccucgauccuccauggcuuaag

SEQ ID NO: 39 - RNA, 40 nt, Artificial Sequence
  Synthetic oligonucleotide
gaauuaguacugacggccgccuugauccuccguuagucug

SEQ ID NO: 40 - RNA, 40 nt, Artificial Sequence
  Synthetic oligonucleotide
gcccgccuccgaagcccuccuaagugcacuuuaaaccgcg

SEQ ID NO: 41 - RNA, 40 nt, Artificial Sequence
  Synthetic oligonucleotide
ccgccugggaucacucucuacgcguauaaaugcucuguca

SEQ ID NO: 42 - RNA, 40 nt, Artificial Sequence
  Synthetic oligonucleotide
agucugacccuguuauggacuaccauaucagaaagguacu

SEQ ID NO: 43 - RNA, 40 nt, Artificial Sequence
  Synthetic oligonucleotide
ggugauccucccccccgccucgaagauuugugcacauauc

SEQ ID NO: 44 - RNA, 40 nt, Artificial Sequence
  Synthetic oligonucleotide
gcuaccaucgucuagugagucacccuuaguucaucaaggc

SEQ ID NO: 45 - DNA, 18 bp, Artificial Sequence
  Synthetic oligonucleotide
gctgtgtgactcctgcaa

SEQ ID NO: 46 - DNA, 19 bp, Artificial Sequence
  Synthetic oligonucleotide
gcagctgtatcttgtctcc

SEQ ID NO: 47 - DNA, 43 bp, Artificial Sequence
  Synthetic oligonucleotide
gtccgcttgggggtgggtatcgaaaattcgcgttctggggcgg

SEQ ID NO: 48 - DNA, 43 bp, Artificial Sequence
  Synthetic oligonucleotide
cttcgctcgtttcaatgttcagttctggtctttaggtctttag

SEQ ID NO: 49 - DNA, 43 bp, Artificial Sequence
  Synthetic oligonucleotide
taggaggataatatgtatccggtgcatcggcctgactttcccc

SEQ ID NO: 50 - DNA, 43 bp, Artificial Sequence
  Synthetic oligonucleotide
taggagggctgaaaacttgcttcttcccggtgcagttataaca

SEQ ID NO: 51 - DNA, 43 bp, Artificial Sequence
  Synthetic oligonucleotide
taggaggataatatgtatccgatgcatgggcccgactttcccc

SEQ ID NO: 52 - DNA, 43 bp, Artificial Sequence
  Synthetic oligonucleotide
tgcgttttccttggggttcagggtaggatgggggtggaggtgg

SEQ ID NO: 53 - DNA, 43 bp, Artificial Sequence
  Synthetic oligonucleotide
ggggggcgggtgggctggtaaaaggtgatgcgggggtattgtt

SEQ ID NO: 54 - DNA, 43 bp, Artificial Sequence
  Synthetic oligonucleotide
taggaggataatatgtatccggtgcatcggcccaactttcccc

SEQ ID NO: 55 - DNA, 43 bp, Artificial Sequence
  Synthetic oligonucleotide
ccaatctcggaaggtttaaataaggtggtctttaggtctttag

SEQ ID NO: 56 - DNA, 43 bp, Artificial Sequence
  Synthetic oligonucleotide
tacgttaagtgggtcgggaggggggaatagggggtttggttgg

SEQ ID NO: 57 - DNA, 43 bp, Artificial Sequence
  Synthetic oligonucleotide
gtgaggtcggtggggcgggggatggtggggggtcgtttacatt

SEQ ID NO: 58 - DNA, 42 bp, Artificial Sequence
  Synthetic oligonucleotide
cgatattgggggggggttggcgggctattttccgggtgggtg

SEQ ID NO: 59 - DNA, 43 bp, Artificial Sequence
  Synthetic oligonucleotide
tcggttcctgttaattcgctggtggttggtggggtggcggatg

SEQ ID NO: 60 - DNA, 42 bp, Artificial Sequence
  Synthetic oligonucleotide
gcggggaggtgggggtgggtggagggttggttactctctact

SEQ ID NO: 61 - DNA, 43 bp, Artificial Sequence
  Synthetic oligonucleotide
cgggaatgggagggtgggggtggtggccgggtcgtgttatacc

SEQ ID NO: 62 - DNA, 43 bp, Artificial Sequence
  Synthetic oligonucleotide
taggaggataatatgtatccggtgcatcggtccgactttcccc

SEQ ID NO: 63 - DNA, 43 bp, Artificial Sequence
  Synthetic oligonucleotide
tatagttgggcgtaggcgggggggggtggttgggaggtccaag

SEQ ID NO: 64 - DNA, 43 bp, Artificial Sequence
  Synthetic oligonucleotide
taggaggataatatgtatccggtgcatcggcccgaccttcccc

SEQ ID NO: 65 - DNA, 43 bp, Artificial Sequence
  Synthetic oligonucleotide
tcgatcgtcctcaggatctcgtggttcaaatcataaagattat

SEQ ID NO: 66 - DNA, 43 bp, Artificial Sequence
  Synthetic oligonucleotide
tgctgtctgggcgggggcggtcttgtggtttctttgggggggg

SEQ ID NO: 67 - DNA, 43 bp, Artificial Sequence
  Synthetic oligonucleotide
gcgagacaggagggtggtcttatacgtgggggggggtggttgg

SEQ ID NO: 68 - DNA, 43 bp, Artificial Sequence
  Synthetic oligonucleotide
taggagggctgaagacttgcttcttcccggtgcagttataaca

SEQ ID NO: 69 - DNA, 43 bp, Artificial Sequence
  Synthetic oligonucleotide
cgtgtggggggtgggttgggctcgggttgttatcagttccatg

SEQ ID NO: 70 - DNA, 43 bp, Artificial Sequence
  Synthetic oligonucleotide
cgatattggggggggggttggcgggctattttccgggtgggtg

SEQ ID NO: 71 - DNA, 43 bp, Artificial Sequence
  Synthetic oligonucleotide
taggaggataatatgtatccggtgcatcggcccgactttcctc

SEQ ID NO: 72 - DNA, 43 bp, Artificial Sequence
  Synthetic oligonucleotide
taggaggataatatgtatccggtgcatcggctcgactttcccc

SEQ ID NO: 73 - DNA, 43 bp, Artificial Sequence
  Synthetic oligonucleotide
cttcgctcgtttcaatgtttagttctggtctttaggtctttag

SEQ ID NO: 74 - DNA, 43 bp, Artificial Sequence
  Synthetic oligonucleotide
ggacatgggttgggtcgggagggggtggtcggttgggcagtaa

SEQ ID NO: 75 - DNA, 43 bp, Artificial Sequence
  Synthetic oligonucleotide
taggaggataatatgtatacgatgcatcggcccgactttcccc

SEQ ID NO: 76 - DNA, 43 bp, Artificial Sequence
  Synthetic oligonucleotide
taggaggataatatgtatcagatgcatcggcccgactttcccc

SEQ ID NO: 77 - DNA, 43 bp, Artificial Sequence
  Synthetic oligonucleotide
tggatgtatggggtctcggggtgggagggttcaacttatctgg

SEQ ID NO: 78 - DNA, 43 bp, Artificial Sequence; identical to SEQ ID NO: 47
  Synthetic oligonucleotide

SEQ ID NO: 79 - DNA, 43 bp, Artificial Sequence
  Synthetic oligonucleotide
tcttgtacaaataggagggaagggggttttgggaggtgggtgg

SEQ ID NO: 80 - DNA, 43 bp, Artificial Sequence; identical to SEQ ID NO: 48
  Synthetic oligonucleotide

SEQ ID NO: 81 - DNA, 43 bp, Artificial Sequence
  Synthetic oligonucleotide
ctgatgttagtaggtcggggtccggttgggggttgggttgagg

SEQ ID NO: 82 - DNA, 43 bp, Artificial Sequence
  Synthetic oligonucleotide
tggctcgtggacgtggtggtggcgggtcgtgggggtgggtagg

SEQ ID NO: 83 - DNA, 43 bp, Artificial Sequence
  Synthetic oligonucleotide
taggaggataatatgtatccgatgcatcggcacgactttcccc

SEQ ID NO: 84 - DNA, 43 bp, Artificial Sequence
  Synthetic oligonucleotide
cggggagggggggtcggggtatttattgtgtatgttttttgtg

SEQ ID NO: 85 - DNA, 43 bp, Artificial Sequence
  Synthetic oligonucleotide
tgactgtatcttggggcgggttctggggggggtgtattgttca

SEQ ID NO: 86 - DNA, 43 bp, Artificial Sequence
  Synthetic oligonucleotide
taggaggataatatgtatccgatgcatcggcccgactttcacc

SEQ ID NO: 87 - DNA, 43 bp, Artificial Sequence
  Synthetic oligonucleotide
tcatgtctaggggggggaagtcggtttgggtgggtactctgtg

SEQ ID NO: 88 - DNA, 43 bp, Artificial Sequence
  Synthetic oligonucleotide
cttgtttcgctttgggtttgggcgggtgggtcaattcctgttg

SEQ ID NO: 89 - DNA, 43 bp, Artificial Sequence
  Synthetic oligonucleotide
ggtgggggccctcggtactgtggcggggtgggtgggtttagtg

SEQ ID NO: 90 - DNA, 43 bp, Artificial Sequence; identical to SEQ ID NO: 52
  Synthetic oligonucleotide

SEQ ID NO: 91 - DNA, 43 bp, Artificial Sequence
  Synthetic oligonucleotide
tggtggggtgggtctgtggggtggttttgttcttatcggggtt

SEQ ID NO: 92 - DNA, 43 bp, Artificial Sequence
  Synthetic oligonucleotide
tgggtgggttacgggtgggtgttgttatcgcgctgatctggtt

SEQ ID NO: 93 - DNA, 43 bp, Artificial Sequence
  Synthetic oligonucleotide
cgtgacggttttaatcaggggggggactctaacatttgggtgg

SEQ ID NO: 94 - DNA, 43 bp, Artificial Sequence
  Synthetic oligonucleotide
tgctcatatcgtggggggatggggttgctagtggatggggtgg

SEQ ID NO: 95 - DNA, 43 bp, Artificial Sequence; identical to SEQ ID NO: 53
  Synthetic oligonucleotide

SEQ ID NO: 96 - DNA, 43 bp, Artificial Sequence
  Synthetic oligonucleotide
tgatgtggggggtggggtataatacttatgtttggggtttggg

SEQ ID NO: 97 - DNA, 43 bp, Artificial Sequence
  Synthetic oligonucleotide
ttgggtgggtgggaatgggtattttttcttcgggcgatgtttg

SEQ ID NO: 98 - DNA, 43 bp, Artificial Sequence
  Synthetic oligonucleotide
tagttggatactggatttgggagggatggggggaggagggtgg

SEQ ID NO: 99 - DNA, 42 bp, Artificial Sequence
  Synthetic oligonucleotide
ctggaaggttgggtgtggggcgggggggaggtctctctatgt

SEQ ID NO: 100 - DNA, 43 bp, Artificial Sequence; identical to SEQ ID NO: 56
  Synthetic oligonucleotide

SEQ ID NO: 101 - DNA, 43 bp, Artificial Sequence
  Synthetic oligonucleotide
tgccgtgggccggggagggtgggttggcgtctctgtttcgata

SEQ ID NO: 102 - DNA, 43 bp, Artificial Sequence
  Synthetic oligonucleotide
gggggggcggccggggtggactgtggcccgtcttcgtattgtt

SEQ ID NO: 103 - DNA, 42 bp, Artificial Sequence
  Synthetic oligonucleotide
tggtggtggctgggggacgggtatcctggaattaggggtggg

SEQ ID NO: 104 - DNA, 43 bp, Artificial Sequence
  Synthetic oligonucleotide
tcggttcatgttgggtgggatcggggcggggtttcttctcctg

SEQ ID NO: 105 - DNA, 43 bp, Artificial Sequence; identical to SEQ ID NO: 75
  Synthetic oligonucleotide

SEQ ID NO: 106 - DNA, 43 bp, Artificial Sequence
  Synthetic oligonucleotide
tcgtgggtgtgttctggggggcgtggacgggggttaatgggca

SEQ ID NO: 107 - DNA, 43 bp, Artificial Sequence
  Synthetic oligonucleotide
taggaggataatatgtatccgatgcatcggcccgactttcccc

SEQ ID NO: 108 - DNA, 43 bp, Artificial Sequence
  Synthetic oligonucleotide
taagagtcttaggatgacgtcattcgtccgtcacggtgcggga

SEQ ID NO: 109 - DNA, 43 bp, Artificial Sequence
  Synthetic oligonucleotide
gcctggccagatagcagttaccttacgggatctatattcaccg

SEQ ID NO: 110 - DNA, 43 bp, Artificial Sequence; identical to SEQ ID NO: 82
  Synthetic oligonucleotide

SEQ ID NO: 111 - DNA, 43 bp, Artificial Sequence
  Synthetic oligonucleotide
ttcgtgttcatctgtttattgttattcacaatccgtcttttgt

SEQ ID NO: 112 - DNA, 43 bp, Artificial Sequence
  Synthetic oligonucleotide
cgaatccgtcgaccgccctcgtaaccatccaacccagtctcct

SEQ ID NO: 113 - DNA, 43 bp, Artificial Sequence
  Synthetic oligonucleotide
caggaaagttacttatcttttagacggttatgttctcattact

SEQ ID NO: 114 - DNA, 43 bp, Artificial Sequence
  Synthetic oligonucleotide
atctgctcgatacgtagatagtctgctcgatacaaaagggtgg

SEQ ID NO: 115 - DNA, 43 bp, Artificial Sequence
  Synthetic oligonucleotide
cgatgagcgggctccgatattgtgtcggcgtgactaccttgat

SEQ ID NO: 116 - DNA, 43 bp, Artificial Sequence
  Synthetic oligonucleotide
ggtcggcctatttattgcggcacgttgtttcttgatgtcgccc

SEQ ID NO: 117 - DNA, 43 bp, Artificial Sequence
  Synthetic oligonucleotide
tcgaattcagttctacatgtgtatttcttgctccgtttcagaa

SEQ ID NO: 118 - DNA, 43 bp, Artificial Sequence
  Synthetic oligonucleotide
tcggtccggcaacaaaccccacgcgccttcgatatgcctgtcg

SEQ ID NO: 119 - DNA, 43 bp, Artificial Sequence; identical to SEQ ID NO: 55
  Synthetic oligonucleotide

SEQ ID NO: 120 - DNA, 43 bp, Artificial Sequence; identical to SEQ ID NO: 70
  Synthetic oligonucleotide

SEQ ID NO: 121 - DNA, 43 bp, Artificial Sequence; identical to SEQ ID NO: 61
  Synthetic oligonucleotide

SEQ ID NO: 122 - DNA, 43 bp, Artificial Sequence
  Synthetic oligonucleotide
cgtggtgggttcttgggtggggggggagggttggcgtagtata

SEQ ID NO: 123 - DNA, 43 bp, Artificial Sequence; identical to SEQ ID NO: 57
  Synthetic oligonucleotide

SEQ ID NO: 124 - DNA, 43 bp, Artificial Sequence; identical to SEQ ID NO: 56
  Synthetic oligonucleotide

SEQ ID NO: 125 - DNA, 43 bp, Artificial Sequence; identical to SEQ ID NO: 54
  Synthetic oligonucleotide

SEQ ID NO: 126 - DNA, 43 bp, Artificial Sequence; identical to SEQ ID NO: 50
  Synthetic oligonucleotide

SEQ ID NO: 127 - DNA, 43 bp, Artificial Sequence; identical to SEQ ID NO: 59
  Synthetic oligonucleotide

SEQ ID NO: 128 - DNA, 43 bp, Artificial Sequence; identical to SEQ ID NO: 66
  Synthetic oligonucleotide

SEQ ID NO: 129 - DNA, 43 bp, Artificial Sequence
  Synthetic oligonucleotide
aacatggggttctgataaacctgtgccaaatacattgttgagt

SEQ ID NO: 130 - DNA, 43 bp, Artificial Sequence
  Synthetic oligonucleotide
attcctcctttgtaagggatgatatccaactcctctgcgttcg

SEQ ID NO: 131 - DNA, 20 bp, Artificial Sequence
  Synthetic oligonucleotide
ctagcatgactgcagtacgt

SEQ ID NO: 132 - DNA, 33 bp, Artificial Sequence
  Synthetic oligonucleotide
ctgtctcttatacacatctgacgctgccgacga

SEQ ID NO: 133 - DNA, 15 bp, Artificial Sequence
  Synthetic oligonucleotide
tcgtcggcagcgtca

SEQ ID NO: 134 - protein, 8 aa, Artificial Sequence
  Synthetic peptide
DYKDDDDK

SEQ ID NO: 135 - protein, 9 aa, Artificial Sequence
  Synthetic peptide
YPYDVPDYA

SEQ ID NO: 136 - protein, 10 aa, Artificial Sequence
  Synthetic peptide
EQKLISEEDL

SEQ ID NO: 137 - DNA, 35 bp, Artificial Sequence
  Synthetic oligonucleotide
aacccgcgtgattggggtactgcccatgcgacttt

SEQ ID NO: 138 - DNA, 35 bp, Artificial Sequence
  Synthetic oligonucleotide
aactgaaggccaattaaactccactgtgctaatct

SEQ ID NO: 139 - DNA, 38 bp, Artificial Sequence
  Synthetic oligonucleotide
acatgccggcgttgatactctactgtgctccattatga

SEQ ID NO: 140 - DNA, 36 bp, Artificial Sequence
  Synthetic oligonucleotide
agacatgccacgccctttacatactccactgtgcca

SEQ ID NO: 141 - DNA, 34 bp, Artificial Sequence
  Synthetic oligonucleotide
agccacgcagacctatctctactgtgccaatgtt

SEQ ID NO: 142 - DNA, 37 bp, Artificial Sequence
  Synthetic oligonucleotide
aggtacgtaaggctgccattactctctactgtgccga

SEQ ID NO: 143 - DNA, 35 bp, Artificial Sequence
  Synthetic oligonucleotide
agtctagcgatcgacttttctctacggtgcccttc

SEQ ID NO: 144 - DNA, 37 bp, Artificial Sequence
  Synthetic oligonucleotide
agtgtgcgcatgaatccattactccactgtgccttga

SEQ ID NO: 145 - DNA, 37 bp, Artificial Sequence
  Synthetic oligonucleotide
agttgcagacccttgtattctctaccgtgccctatga

SEQ ID NO: 146 - DNA, 34 bp, Artificial Sequence
  Synthetic oligonucleotide
cactgctaactgatattgttgaactccaccgtgc

SEQ ID NO: 147 - DNA, 38 bp, Artificial Sequence
  Synthetic oligonucleotide
catgcgacaagcttccattaaccatccgctatttatga

SEQ ID NO: 148 - DNA, 36 bp, Artificial Sequence
  Synthetic oligonucleotide
catgcggaccacgctttcacaaactcatgattcaaa

SEQ ID NO: 149 - DNA, 35 bp, Artificial Sequence
  Synthetic oligonucleotide
catgcgtacgtcctattctctctactgtgcattaa

SEQ ID NO: 150 - DNA, 35 bp, Artificial Sequence
  Synthetic oligonucleotide
cctgcaatgcggaaacccttctactctactgtgcc

SEQ ID NO: 151 - DNA, 36 bp, Artificial Sequence
  Synthetic oligonucleotide
cgcgagccagggtactgcctgcggtctaaacaatca

SEQ ID NO: 152 - DNA, 36 bp, Artificial Sequence
  Synthetic oligonucleotide
cgtgcgacttgttctctactgtgccaataaaccata

SEQ ID NO: 153 - DNA, 35 bp, Artificial Sequence
  Synthetic oligonucleotide
gatagcgcatattcctctactgtgctacttgttat

SEQ ID NO: 154 - DNA, 36 bp, Artificial Sequence
  Synthetic oligonucleotide
gcaaaccaattagtgtacctctaccgtgcccaatga

SEQ ID NO: 155 - DNA, 38 bp, Artificial Sequence
  Synthetic oligonucleotide
gcaactactctctaccgtgcccagtgatttctccatga

SEQ ID NO: 156 - DNA, 36 bp, Artificial Sequence
  Synthetic oligonucleotide
gcaccacatgtcaatctctactgtgcttatctcata

SEQ ID NO: 157 - DNA, 36 bp, Artificial Sequence
  Synthetic oligonucleotide
gcagcacaaaagttactctcctctaccgtgccccta

SEQ ID NO: 158 - DNA, 36 bp, Artificial Sequence
  Synthetic oligonucleotide
gcagtttgcgtggatactctactgtgctgaccctta

SEQ ID NO: 159 - DNA, 36 bp, Artificial Sequence
  Synthetic oligonucleotide
gcatacatgaactctaccgtgcccgttgacttgaaa

SEQ ID NO: 160 - DNA, 35 bp, Artificial Sequence
  Synthetic oligonucleotide
gcatagcggttcacattattttactctaccgtgcc

SEQ ID NO: 161 - DNA, 34 bp, Artificial Sequence
  Synthetic oligonucleotide
gccacagtatcgttctcgagctggttcccgccat

SEQ ID NO: 162 - DNA, 38 bp, Artificial Sequence
  Synthetic oligonucleotide
gcgaacatcactctaccgtgccatctgaaatgacgtga

SEQ ID NO: 163 - DNA, 38 bp, Artificial Sequence
  Synthetic oligonucleotide
gcgaacttgtaactctactgtgcttatattaaggttga

SEQ ID NO: 164 - DNA, 35 bp, Artificial Sequence
  Synthetic oligonucleotide
gcgaccaatactctactgtgctgatacggatttta

SEQ ID NO: 165 - DNA, 35 bp, Artificial Sequence
  Synthetic oligonucleotide
gcgaccactctataacctcaaccgtgctcactcct

SEQ ID NO: 166 - DNA, 37 bp, Artificial Sequence
  Synthetic oligonucleotide
gcgcaagttgtctctaccgtgccccgaaagttttgga

SEQ ID NO: 167 - DNA, 35 bp, Artificial Sequence
  Synthetic oligonucleotide
gcgcaccacctacattgtctccaccgtgctttatt

SEQ ID NO: 168 - DNA, 36 bp, Artificial Sequence
  Synthetic oligonucleotide
gcgcacccacgtgaactctaccgtgcctatttccta

SEQ ID NO: 169 - DNA, 38 bp, Artificial Sequence
  Synthetic oligonucleotide
gcgcaccgacctctaccgtgccaaaataggttatctga

SEQ ID NO: 170 - DNA, 35 bp, Artificial Sequence
  Synthetic oligonucleotide
gcgccaccacacaaaccttccctatcgagggagat

SEQ ID NO: 171 - DNA, 37 bp, Artificial Sequence
  Synthetic oligonucleotide
gcgcggactatattactctactgtgccctgcttatga

SEQ ID NO: 172 - DNA, 35 bp, Artificial Sequence
  Synthetic oligonucleotide
gcggataggacaataacttactccactgtgccatc

SEQ ID NO: 173 - DNA, 35 bp, Artificial Sequence
  Synthetic oligonucleotide
gcggtgacctctactgtgcgccccaagccttagtt

SEQ ID NO: 174 - DNA, 38 bp, Artificial Sequence
  Synthetic oligonucleotide
gcgtacagaacctctaccgtgcccactcacttccatga

SEQ ID NO: 175 - DNA, 35 bp, Artificial Sequence
  Synthetic oligonucleotide
gcgtcccctcccggatggtcctttctctactgtgc

SEQ ID NO: 176 - DNA, 35 bp, Artificial Sequence
  Synthetic oligonucleotide
gcgtgctaacggtatgcaagacgtatgcgattttc

SEQ ID NO: 177 - DNA, 35 bp, Artificial Sequence
  Synthetic oligonucleotide
gctagaccgatccacctcaaacctctactgtgcct

SEQ ID NO: 178 - DNA, 35 bp, Artificial Sequence
  Synthetic oligonucleotide
gctagcttagctctaccgtgcacattccgctattt

SEQ ID NO: 179 - DNA, 35 bp, Artificial Sequence
  Synthetic oligonucleotide
ggtgcaggcaagatattttactctactgtgcattt

SEQ ID NO: 180 - DNA, 35 bp, Artificial Sequence
  Synthetic oligonucleotide
gtaaatgtacatgcgtatcctcacctctactgtgc

SEQ ID NO: 181 - DNA, 35 bp, Artificial Sequence
  Synthetic oligonucleotide
taacacgtctttcactctactgtgccctttatgcc

SEQ ID NO: 182 - DNA, 38 bp, Artificial Sequence
  Synthetic oligonucleotide
taatggcatgcggacctatcctctaccgtgctccttga

SEQ ID NO: 183 - DNA, 35 bp, Artificial Sequence
  Synthetic oligonucleotide
tatgcgatttctctaccgtgccaatatgccttgtt

SEQ ID NO: 184 - DNA, 36 bp, Artificial Sequence
  Synthetic oligonucleotide
tctgcgattctaccgttactctaccgtgccaccaaa

SEQ ID NO: 185 - DNA, 36 bp, Artificial Sequence
  Synthetic oligonucleotide
tgcgcagtcatttcgccatgttctctaccgtgccaa

SEQ ID NO: 186 - DNA, 38 bp, Artificial Sequence
  Synthetic oligonucleotide
tgtcaggcggtagtactctccaccgtgcctattgttga

SEQ ID NO: 187 - DNA, 35 bp, Artificial Sequence
  Synthetic oligonucleotide
acatgcataccctacgaatcgttccatcaccatac

SEQ ID NO: 188 - DNA, 35 bp, Artificial Sequence
  Synthetic oligonucleotide
agtcagtgcgcccgctatttacgatctcactgttc

SEQ ID NO: 189 - DNA, 35 bp, Artificial Sequence
  Synthetic oligonucleotide
agtgcagtcgcgatgggaacttcttctttgcttta

SEQ ID NO: 190 - DNA, 36 bp, Artificial Sequence
  Synthetic oligonucleotide
atggccatgcgaaccgaaacctagcccattttccta

SEQ ID NO: 191 - DNA, 34 bp, Artificial Sequence
  Synthetic oligonucleotide
attgcggtcatccccttccacgctataccaccat

SEQ ID NO: 192 - DNA, 35 bp, Artificial Sequence
  Synthetic oligonucleotide
cactgcaggtcactggcgccctatttcctcacatt

SEQ ID NO: 193 - DNA, 35 bp, Artificial Sequence
  Synthetic oligonucleotide
catgcccgtaaacgcctaatctaccaccttttgct

SEQ ID NO: 194 - DNA, 35 bp, Artificial Sequence
  Synthetic oligonucleotide
catgccgcctttcgacttccatatcccaacacgcc

SEQ ID NO: 195 - DNA, 35 bp, Artificial Sequence
  Synthetic oligonucleotide
catgccggtcattccatactcaaactcattcactc

SEQ ID NO: 196 - DNA, 35 bp, Artificial Sequence
  Synthetic oligonucleotide
catgcgagctacccttatcatctcatgtttgcttt

SEQ ID NO: 197 - DNA, 35 bp, Artificial Sequence
  Synthetic oligonucleotide
catgcgattgcgccccattccttgccttatctcac

SEQ ID NO: 198 - DNA, 36 bp, Artificial Sequence
  Synthetic oligonucleotide
catgcgcacatcgtactccgtagccctaaattatca

SEQ ID NO: 199 - DNA, 35 bp, Artificial Sequence
  Synthetic oligonucleotide
catgcgccctgtgcgttctctactaccctaatcat

SEQ ID NO: 200 - DNA, 38 bp, Artificial Sequence
  Synthetic oligonucleotide
catgtacgcacacccactgattctttaccacccactga

SEQ ID NO: 201 - DNA, 35 bp, Artificial Sequence
  Synthetic oligonucleotide
gcaggacaccccctcattatttgtttcatcctacg

SEQ ID NO: 202 - DNA, 35 bp, Artificial Sequence
  Synthetic oligonucleotide
gcatcaggcgcactttcatttgctaatcgtttttt

SEQ ID NO: 203 - DNA, 35 bp, Artificial Sequence
  Synthetic oligonucleotide
gccatgcgagagggttattgttgatctcatgggtt

SEQ ID NO: 204 - DNA, 35 bp, Artificial Sequence
  Synthetic oligonucleotide
gcgataaagcccatgtaaccctctgaaaacccgat

SEQ ID NO: 205 - DNA, 35 bp, Artificial Sequence
  Synthetic oligonucleotide
gcgccacgagctacccgacttccgattactttctt

SEQ ID NO: 206 - DNA, 35 bp, Artificial Sequence
  Synthetic oligonucleotide
gcggacatcgggcactttatacaaccacctttttg

SEQ ID NO: 207 - DNA, 36 bp, Artificial Sequence
  Synthetic oligonucleotide
gctgcaggccgtcccaaatattcgctcccacacata

SEQ ID NO: 208 - DNA, 35 bp, Artificial Sequence
  Synthetic oligonucleotide
gctggtcaggcgttccacacttcctacccgctttt

SEQ ID NO: 209 - DNA, 35 bp, Artificial Sequence
  Synthetic oligonucleotide
tatgcgcaggaccacctattacacgaccttatcct

SEQ ID NO: 210 - DNA, 35 bp, Artificial Sequence
  Synthetic oligonucleotide
tcaactggggtcagtgccaacgcttactttcttct

SEQ ID NO: 211 - DNA, 35 bp, Artificial Sequence
  Synthetic oligonucleotide
tcaagcagtcatagccggtttcacgctttacttac

SEQ ID NO: 212 - DNA, 35 bp, Artificial Sequence
  Synthetic oligonucleotide
aaaacacgcaaactacctggaaacttgacttcttt

SEQ ID NO: 213 - DNA, 35 bp, Artificial Sequence
  Synthetic oligonucleotide
aaaacactcacgatacctaccctggtcttcacaac

SEQ ID NO: 214 - DNA, 35 bp, Artificial Sequence
  Synthetic oligonucleotide
aaaacagcaggcattttcctgtactttcgaattca

SEQ ID NO: 215 - DNA, 35 bp, Artificial Sequence
  Synthetic oligonucleotide
aaaaccacagctaccattatcgcattggccctact

SEQ ID NO: 216 - DNA, 35 bp, Artificial Sequence
  Synthetic oligonucleotide
aaaacccaagcaccgaacgaactatccctttttct

SEQ ID NO: 217 - DNA, 35 bp, Artificial Sequence
  Synthetic oligonucleotide
aaaacccaccacgcgtcgtacgcataccacccttt

SEQ ID NO: 218 - DNA, 35 bp, Artificial Sequence
  Synthetic oligonucleotide
aaaaccggtcctgcgccttcttctccgcttttatt

SEQ ID NO: 219 - DNA, 35 bp, Artificial Sequence
  Synthetic oligonucleotide
caggtactgtggcaggcgatccattgctctctttt

SEQ ID NO: 220 - DNA, 35 bp, Artificial Sequence
  Synthetic oligonucleotide
caggtcagcagtccaggcgattactttctcttttc

SEQ ID NO: 221 - DNA, 35 bp, Artificial Sequence
  Synthetic oligonucleotide
cagtaaccgctgtctgtcatttttcaacattctgt

SEQ ID NO: 222 - DNA, 36 bp, Artificial Sequence
  Synthetic oligonucleotide
cagtaactgtagtcgtcgaaccttgcttacaaccca

SEQ ID NO: 223 - DNA, 35 bp, Artificial Sequence
  Synthetic oligonucleotide
cagtaaggaagctcatgcggtacaggtctacctcg

SEQ ID NO: 224 - DNA, 38 bp, Artificial Sequence
  Synthetic oligonucleotide
cagtaagtgctgtcactgcgccacttgtaaatacttga

SEQ ID NO: 225 - DNA, 36 bp, Artificial Sequence
  Synthetic oligonucleotide
cagtaatgcgaagctagtacgttctctcttatttta

SEQ ID NO: 226 - DNA, 35 bp, Artificial Sequence
  Synthetic oligonucleotide
cagtacaaacatcgcgattctttccttgatactgt

SEQ ID NO: 227 - DNA, 35 bp, Artificial Sequence
  Synthetic oligonucleotide
gagggcggctctaatgcatgcgctttcatctttgc

SEQ ID NO: 228 - DNA, 36 bp, Artificial Sequence
  Synthetic oligonucleotide
gagggcgggcagtcatttcgattatatctgcctaca

SEQ ID NO: 229 - DNA, 37 bp, Artificial Sequence
  Synthetic oligonucleotide
gagggcggtccaacgcgcaatgtcttttttcttccga

SEQ ID NO: 230 - DNA, 35 bp, Artificial Sequence
  Synthetic oligonucleotide
gagggcgtacaggagtcttgcggtccacattttat

SEQ ID NO: 231 - DNA, 35 bp, Artificial Sequence
  Synthetic oligonucleotide
gagggctactgaagttaatggcattcttctctatc

SEQ ID NO: 232 - DNA, 35 bp, Artificial Sequence
  Synthetic oligonucleotide
gagggctcatgccagccgcttttcttacctttatc

SEQ ID NO: 233 - DNA, 38 bp, Artificial Sequence
  Synthetic oligonucleotide
gagggctgaacaagtagtgcgtacattttccttcctga

SEQ ID NO: 234 - DNA, 35 bp, Artificial Sequence
  Synthetic oligonucleotide
gagggctgcaggcatccaatttcctccttgtccct

SEQ ID NO: 235 - DNA, 35 bp, Artificial Sequence
  Synthetic oligonucleotide
gaggggccgtccttcgtacggaatgtgcatgcgct

SEQ ID NO: 236 - DNA, 35 bp, Artificial Sequence
  Synthetic oligonucleotide
gaggggcggtcattgccgttagcctcctttcgcct

SEQ ID NO: 237 - DNA, 37 bp, Artificial Sequence
  Synthetic oligonucleotide
gcgaaactcgccatatacttaaacttgcccttttgga

SEQ ID NO: 238 - DNA, 38 bp, Artificial Sequence
  Synthetic oligonucleotide
aactgcacgtaaccttaatcactccaccgtgccattga

SEQ ID NO: 239 - DNA, 36 bp, Artificial Sequence
  Synthetic oligonucleotide
ttcgccgttaagcatcgtgtcatgcgcaactgttaa

SEQ ID NO: 240 - DNA, 35 bp, Artificial Sequence
  Synthetic oligonucleotide
acgcggacctagcatatcgtagtgcgtggcacttt

SEQ ID NO: 241 - DNA, 35 bp, Artificial Sequence
  Synthetic oligonucleotide
tatgcgcgccatcaccggaactaggtttgggcttt

SEQ ID NO: 242 - DNA, 35 bp, Artificial Sequence
  Synthetic oligonucleotide
gagtacggaatcgtgtcatcagctggatacttttt

SEQ ID NO: 243 - DNA, 38 bp, Artificial Sequence
  Synthetic oligonucleotide
atgcactgggctgaccggtattgcgtatttctctttga

SEQ ID NO: 244 - DNA, 35 bp, Artificial Sequence
  Synthetic oligonucleotide
tatgccccgttccattcttcattcactactagccc

SEQ ID NO: 245 - DNA, 36 bp, Artificial Sequence
  Synthetic oligonucleotide
aagcacaggtactagcaggttcgcactccctgacta

SEQ ID NO: 246 - DNA, 35 bp, Artificial Sequence
  Synthetic oligonucleotide
cacgccccaatatgccatactctactgtgcccctt

SEQ ID NO: 247 - DNA, 35 bp, Artificial Sequence
  Synthetic oligonucleotide
aatgcgcgctaaagaaggacttgtcttgccagccc

SEQ ID NO: 248 - DNA, 35 bp, Artificial Sequence
  Synthetic oligonucleotide
gaacggatcgtagtgaaacaggactggagcggccc

SEQ ID NO: 249 - DNA, 35 bp, Artificial Sequence
  Synthetic oligonucleotide
tcgtaggacaaaggcactggttgaatcttttctat

SEQ ID NO: 250 - DNA, 35 bp, Artificial Sequence
  Synthetic oligonucleotide
tgcgcgctaaacactgcaagtctagccccgcattc

SEQ ID NO: 251 - DNA, 35 bp, Artificial Sequence
  Synthetic oligonucleotide
tcacctaccaagtctccaatcattgcaccctctac

SEQ ID NO: 252 - DNA, 36 bp, Artificial Sequence
  Synthetic oligonucleotide
gcctatcaatgtctctctactgtgccggacttttta

SEQ ID NO: 253 - DNA, 36 bp, Artificial Sequence
  Synthetic oligonucleotide
aggactgcccccgcctgactctactgtgccatctca

SEQ ID NO: 254 - DNA, 35 bp, Artificial Sequence
  Synthetic oligonucleotide
ggtagctccaccgtgccatactcgatctttgttac

SEQ ID NO: 255 - DNA, 38 bp, Artificial Sequence
  Synthetic oligonucleotide
ttccgcgacctaactccaccgtgccataatccctttga

SEQ ID NO: 256 - DNA, 36 bp, Artificial Sequence
  Synthetic oligonucleotide
agacttaagcaaggtcgtacgtaggtagtcccacca

SEQ ID NO: 257 - DNA, 36 bp, Artificial Sequence
  Synthetic oligonucleotide
gctaactgcaggccccctatccgacctaaatataca

SEQ ID NO: 258 - DNA, 36 bp, Artificial Sequence
  Synthetic oligonucleotide
atcgtagtacgaatgtcaagcgtacacgctttccta

SEQ ID NO: 259 - DNA, 36 bp, Artificial Sequence
  Synthetic oligonucleotide
gcgttgatctctaccgtgcaccgaacactccccaca

SEQ ID NO: 260 - DNA, 38 bp, Artificial Sequence
  Synthetic oligonucleotide
gccgctatatcaatcctctactgtgcgaattaacctga

SEQ ID NO: 261 - DNA, 35 bp, Artificial Sequence
  Synthetic oligonucleotide
ttgctgttatcgtcctctactgtgccggtattcct

SEQ ID NO: 262 - DNA, 35 bp, Artificial Sequence
  Synthetic oligonucleotide
gtcatgcggaagctttcctgttttggtataatgtc

SEQ ID NO: 263 - DNA, 36 bp, Artificial Sequence
  Synthetic oligonucleotide
gcgaacagatttctctacggtgcttacacatattta

SEQ ID NO: 264 - DNA, 36 bp, Artificial Sequence
  Synthetic oligonucleotide
actggaaggagtcctacctgcctgacgcgtgacgta

SEQ ID NO: 265 - DNA, 38 bp, Artificial Sequence
  Synthetic oligonucleotide
gccaatactccactgtgcttgattttacttttgaatga

SEQ ID NO: 266 - DNA, 35 bp, Artificial Sequence
  Synthetic oligonucleotide
tgacctactaagtcagcgcacatcctgggctttct

SEQ ID NO: 267 - DNA, 35 bp, Artificial Sequence
  Synthetic oligonucleotide
tgtctctactgtgcccaattgttcggaaataactt

SEQ ID NO: 268 - DNA, 35 bp, Artificial Sequence
  Synthetic oligonucleotide
aacctctgctgtgcgttaaactctaccgtgcctac

SEQ ID NO: 269 - DNA, 36 bp, Artificial Sequence
  Synthetic oligonucleotide
tacaacgcgtgcttggggtgacgtggtgcctcttta

SEQ ID NO: 270 - DNA, 36 bp, Artificial Sequence
  Synthetic oligonucleotide
tagtcttgccgtctatctctaccgtgcctggcccta

SEQ ID NO: 271 - DNA, 35 bp, Artificial Sequence
  Synthetic oligonucleotide
gcggaactcgcccccttacatcattttttttggtt

SEQ ID NO: 272 - DNA, 35 bp, Artificial Sequence
  Synthetic oligonucleotide
tgcgtgctaaacggtctagcacatgcgggcctcac

SEQ ID NO: 273 - DNA, 38 bp, Artificial Sequence
  Synthetic oligonucleotide
gctgcagtgcgactctggcctccactgtgctaccttga

SEQ ID NO: 274 - DNA, 35 bp, Artificial Sequence
  Synthetic oligonucleotide
ggccacgactggttccccaattcacaggtatacat

SEQ ID NO: 275 - DNA, 35 bp, Artificial Sequence
  Synthetic oligonucleotide
gcgatagccttaacttgccttctgtgaactcgcct

SEQ ID NO: 276 - DNA, 35 bp, Artificial Sequence
  Synthetic oligonucleotide
tcacctactaggtccatccaatacttattgtccca

SEQ ID NO: 277 - DNA, 35 bp, Artificial Sequence
  Synthetic oligonucleotide
catgcggcaagcttttaactcagctttatctcata

SEQ ID NO: 278 - DNA, 38 bp, Artificial Sequence
  Synthetic oligonucleotide
catgacattttctccactgtgcttgtaattagtattga

SEQ ID NO: 279 - DNA, 36 bp, Artificial Sequence
  Synthetic oligonucleotide
aactccaccgtgcccacttcttgtttcatagtttaa

SEQ ID NO: 280 - DNA, 38 bp, Artificial Sequence
  Synthetic oligonucleotide
ccatgcgattttgtttcccctctactgtgcttatctga

SEQ ID NO: 281 - DNA, 35 bp, Artificial Sequence
  Synthetic oligonucleotide
tgttcacctgtccttcctctctactgtgccgttct

SEQ ID NO: 282 - DNA, 35 bp, Artificial Sequence
  Synthetic oligonucleotide
atgcgcgcgatcgaggtccccgatggcttcgctcc

SEQ ID NO: 283 - DNA, 36 bp, Artificial Sequence
  Synthetic oligonucleotide
tccgcgtgtaaccttggcatgtacctagtgtccaca

SEQ ID NO: 284 - DNA, 36 bp, Artificial Sequence
  Synthetic oligonucleotide
catgccaagctttcatttaggatttcgcccacatca

SEQ ID NO: 285 - DNA, 37 bp, Artificial Sequence
  Synthetic oligonucleotide
gcgtctgcgtcctagttttctctaccgtgcttttcga

SEQ ID NO: 286 - DNA, 36 bp, Artificial Sequence
  Synthetic oligonucleotide
ggctgctagacctccaccgtgccctttctttggtta

SEQ ID NO: 287 - DNA, 35 bp, Artificial Sequence
  Synthetic oligonucleotide
gagtcaggcccaggcttacatatcactagctttta

SEQ ID NO: 288 - DNA, 36 bp, Artificial Sequence
  Synthetic oligonucleotide
aatactctactgtgccccccgttttctcatcgatca

SEQ ID NO: 289 - DNA, 35 bp, Artificial Sequence
  Synthetic oligonucleotide
aggcatgcgcagagttaatttttttctctactgtg

SEQ ID NO: 290 - DNA, 36 bp, Artificial Sequence
  Synthetic oligonucleotide
gacctgcagcgcacgcccgatatctctactgtgcca

SEQ ID NO: 291 - DNA, 36 bp, Artificial Sequence
  Synthetic oligonucleotide
ccggggctaggaaagctaccacgtcatgcggaacta

SEQ ID NO: 292 - DNA, 35 bp, Artificial Sequence
  Synthetic oligonucleotide
catctcaaaactttcctctaccgtgcaaacattta

SEQ ID NO: 293 - DNA, 35 bp, Artificial Sequence
  Synthetic oligonucleotide
gcgatcgaacttgcctcctacaatcatcaactagc

SEQ ID NO: 294 - DNA, 38 bp, Artificial Sequence
  Synthetic oligonucleotide
cagtcatcccgtggactctgtgctcgtatctccattga

SEQ ID NO: 295 - DNA, 36 bp, Artificial Sequence
  Synthetic oligonucleotide
tcgtagtacgcggtgaaccctcaatttacgccccta

SEQ ID NO: 296 - DNA, 37 bp, Artificial Sequence
  Synthetic oligonucleotide
gcgtcgtccaactccactgtgcccattttaggtctga

SEQ ID NO: 297 - DNA, 35 bp, Artificial Sequence
  Synthetic oligonucleotide
gcatatgcggtgtttctactctaccgtgcaaaacc

SEQ ID NO: 298 - DNA, 36 bp, Artificial Sequence
  Synthetic oligonucleotide
gcggcaacacttcctctactgtgcttcctggcttaa

SEQ ID NO: 299 - DNA, 35 bp, Artificial Sequence
  Synthetic oligonucleotide
gattcggtccccttcttctctactgtgccttttct

SEQ ID NO: 300 - DNA, 35 bp, Artificial Sequence
  Synthetic oligonucleotide
ccgcgtgcttggtgcgtgctgcaggaaattggaaa

SEQ ID NO: 301 - DNA, 36 bp, Artificial Sequence
  Synthetic oligonucleotide
gcgtgccaacggactggagctctattgattgttcta

SEQ ID NO: 302 - DNA, 35 bp, Artificial Sequence
  Synthetic oligonucleotide
atgtacgtgcgtaccttttatattctctactgtgc

SEQ ID NO: 303 - DNA, 36 bp, Artificial Sequence
  Synthetic oligonucleotide
agagcctgggcttgctagctggatttggtcacgaaa

SEQ ID NO: 304 - DNA, 35 bp, Artificial Sequence
  Synthetic oligonucleotide
tactgcgcgcctggacccgtgtgctagacatgcgc

SEQ ID NO: 305 - DNA, 36 bp, Artificial Sequence
  Synthetic oligonucleotide
ccgtggtgccctgcgcgctaagaggctcacggagta

SEQ ID NO: 306 - DNA, 35 bp, Artificial Sequence
  Synthetic oligonucleotide
gtaccggacctagggactaacgtactggcacctct

SEQ ID NO: 307 - DNA, 36 bp, Artificial Sequence
  Synthetic oligonucleotide
taccgcgagcttgggaagtgctgctacgtctgccga

SEQ ID NO: 308 - DNA, 35 bp, Artificial Sequence
  Synthetic oligonucleotide
ggtatgcccgcttttactctactgtgcccgacata

SEQ ID NO: 309 - DNA, 36 bp, Artificial Sequence
  Synthetic oligonucleotide
gtgcaacactaagttgaccggattgagtctagcgaa

SEQ ID NO: 310 - DNA, 35 bp, Artificial Sequence
  Synthetic oligonucleotide
gactgcagggtgtcacctctaccgtgccatgaggt

SEQ ID NO: 311 - DNA, 35 bp, Artificial Sequence
  Synthetic oligonucleotide
ttcgtagtaccaatagtcagtaatgccctttcgcc

SEQ ID NO: 312 - DNA, 38 bp, Artificial Sequence
  Synthetic oligonucleotide
atgcactgtatgcgggctatgcgaatacctagttatga

SEQ ID NO: 313 - DNA, 36 bp, Artificial Sequence
  Synthetic oligonucleotide
cccggcgcgctacgggacgattatgagctcttgcaa

SEQ ID NO: 314 - DNA, 35 bp, Artificial Sequence
  Synthetic oligonucleotide
catgcgcacaggctttttaatctccatgaagtttc

SEQ ID NO: 315 - DNA, 38 bp, Artificial Sequence
  Synthetic oligonucleotide
gcgggcttacacgtactggaggggttgcatgccattga

SEQ ID NO: 316 - DNA, 35 bp, Artificial Sequence
  Synthetic oligonucleotide
gtcgtagtactcgcggtcaagagattccttatttc

SEQ ID NO: 317 - DNA, 35 bp, Artificial Sequence
  Synthetic oligonucleotide
cacgcgtgcttggcgacgttcacttgcgggcctat

SEQ ID NO: 318 - DNA, 36 bp, Artificial Sequence
  Synthetic oligonucleotide
gccacctcactccactgtgctatcttatcgccttca

SEQ ID NO: 319 - DNA, 36 bp, Artificial Sequence
  Synthetic oligonucleotide
cgtgtcctttgaccgtactgcgaaacgcctaccaaa

SEQ ID NO: 320 - DNA, 35 bp, Artificial Sequence
  Synthetic oligonucleotide
gaatcgtaacaaactgcaggcctatctctacttgt

SEQ ID NO: 321 - DNA, 37 bp, Artificial Sequence
  Synthetic oligonucleotide
gcaggaaacctctactgtgccttgtagtatactttga

SEQ ID NO: 322 - DNA, 38 bp, Artificial Sequence
  Synthetic oligonucleotide
gcagtccatagcgctcctggtctcctcttttgctttga

SEQ ID NO: 323 - DNA, 35 bp, Artificial Sequence
  Synthetic oligonucleotide
cgtgccactcaaatcctcctctaccgtgctttttt

SEQ ID NO: 324 - DNA, 35 bp, Artificial Sequence
  Synthetic oligonucleotide
tggagcacgccgccaatggacagtccaccttacct

SEQ ID NO: 325 - DNA, 35 bp, Artificial Sequence
  Synthetic oligonucleotide
gatgggcctgcgtgctaaggcgcgataacgggtgt

SEQ ID NO: 326 - DNA, 35 bp, Artificial Sequence
  Synthetic oligonucleotide
cgcgggccaggtctgcatgcatgcgaggtcacacc

SEQ ID NO: 327 - DNA, 37 bp, Artificial Sequence
  Synthetic oligonucleotide
gcgtgcttacgaacaaggtgcgtgcccgattctccga

SEQ ID NO: 328 - DNA, 36 bp, Artificial Sequence
  Synthetic oligonucleotide
tcagcggacctagcgaacgattgcggccaccactta

SEQ ID NO: 329 - DNA, 38 bp, Artificial Sequence
  Synthetic oligonucleotide
gccgcgcgtgccagcataatcgtactatgtctgcgtga

SEQ ID NO: 330 - DNA, 35 bp, Artificial Sequence
  Synthetic oligonucleotide
atcgtagaactagctagtctgcaatttctggttac

SEQ ID NO: 331 - DNA, 35 bp, Artificial Sequence
  Synthetic oligonucleotide
gccgcgtgcctggccaaactgggtcaacttttctc

SEQ ID NO: 332 - DNA, 38 bp, Artificial Sequence
  Synthetic oligonucleotide
tctatcgcgtgccagtgtacgtacggtgtcttatttga

SEQ ID NO: 333 - DNA, 35 bp, Artificial Sequence
  Synthetic oligonucleotide
ttacgttcccggactctactgtgcccctccctata

SEQ ID NO: 334 - DNA, 35 bp, Artificial Sequence
  Synthetic oligonucleotide
ccaaccgcgcgcctggggactacgtgacatctagc

SEQ ID NO: 335 - DNA, 36 bp, Artificial Sequence
  Synthetic oligonucleotide
tcgtagtactgctgctttgtgcgtccatactcgtta

SEQ ID NO: 336 - DNA, 37 bp, Artificial Sequence
  Synthetic oligonucleotide
atcgtagtactgcaactgggattattcacacactaga

SEQ ID NO: 337 - DNA, 36 bp, Artificial Sequence
  Synthetic oligonucleotide
gaattccgcgcgtagtcgagtactagggaaatcgaa

SEQ ID NO: 338 - DNA, 35 bp, Artificial Sequence
  Synthetic oligonucleotide
catgcggaccatgatttttattgagtttttgcttt

SEQ ID NO: 339 - DNA, 35 bp, Artificial Sequence
  Synthetic oligonucleotide
attcgagcggtcttgcgggtatccctccactgtgc

SEQ ID NO: 340 - DNA, 36 bp, Artificial Sequence
  Synthetic oligonucleotide
catgcgcattactctggtcaacttgccgaatcgaaa

SEQ ID NO: 341 - DNA, 37 bp, Artificial Sequence
  Synthetic oligonucleotide
gggcgtatcgtagccacgtacaagggttgcatattga

SEQ ID NO: 342 - DNA, 36 bp, Artificial Sequence
  Synthetic oligonucleotide
gcgagaagctttcaatcctcaaccttacgctttata

SEQ ID NO: 343 - DNA, 35 bp, Artificial Sequence
  Synthetic oligonucleotide
acgcctaagttgcctctaccgtgccgagccctcca

SEQ ID NO: 344 - DNA, 35 bp, Artificial Sequence
  Synthetic oligonucleotide
tgcggagctagcaacgagggtagagtgcgaattcc

SEQ ID NO: 345 - DNA, 35 bp, Artificial Sequence
  Synthetic oligonucleotide
gataagtcacggacggtttctctactgtgcctttt

SEQ ID NO: 346 - DNA, 36 bp, Artificial Sequence
  Synthetic oligonucleotide
gcgtgccaacaacctgcggacaaaagaccccctaaa

SEQ ID NO: 347 - DNA, 38 bp, Artificial Sequence
  Synthetic oligonucleotide
ggtcatgccgctaggggcgaactcctctgagcctgtga

SEQ ID NO: 348 - DNA, 38 bp, Artificial Sequence
  Synthetic oligonucleotide
cctcgcgcgccagggacgttgcaagttaaaccatatga

SEQ ID NO: 349 - DNA, 35 bp, Artificial Sequence
  Synthetic oligonucleotide
gcaggcgggccaggcttaatacacgcttctactta

SEQ ID NO: 350 - DNA, 34 bp, Artificial Sequence
  Synthetic oligonucleotide
atcgtagtaatgcagcaattgcaatactcctatt

SEQ ID NO: 351 - DNA, 36 bp, Artificial Sequence
  Synthetic oligonucleotide
accgaacctagggacgccccaggaatcacaatgtta

SEQ ID NO: 352 - DNA, 35 bp, Artificial Sequence
  Synthetic oligonucleotide
tactgctaactttcactctaccgtgcaaaccacca

SEQ ID NO: 353 - DNA, 35 bp, Artificial Sequence
  Synthetic oligonucleotide
cccggaagtgggttcgagctgcatcgtgtcaggcc

SEQ ID NO: 354 - DNA, 36 bp, Artificial Sequence
  Synthetic oligonucleotide
tagtaacttcatgcccccagtggaactcctctgaca

SEQ ID NO: 355 - DNA, 35 bp, Artificial Sequence
  Synthetic oligonucleotide
gtccacgcgtgcctgaggacacagccaggaaactt

SEQ ID NO: 356 - DNA, 36 bp, Artificial Sequence
  Synthetic oligonucleotide
aatcgctggccagaaagttagcagtcgaggcccaaa

SEQ ID NO: 357 - DNA, 36 bp, Artificial Sequence
  Synthetic oligonucleotide
agggcgtgccacctcgaacacgcaggtaatttttca

SEQ ID NO: 358 - DNA, 35 bp, Artificial Sequence
  Synthetic oligonucleotide
tcacctaccatgtccgagtaacactcgcccctcca

SEQ ID NO: 359 - DNA, 35 bp, Artificial Sequence
  Synthetic oligonucleotide
cgtggccggtggtccgtactgccaaaatatttaca

SEQ ID NO: 360 - DNA, 35 bp, Artificial Sequence
  Synthetic oligonucleotide
cgcgtgccagcggactttcaccatgcgatacgtgg

SEQ ID NO: 361 - DNA, 36 bp, Artificial Sequence
  Synthetic oligonucleotide
gagttaaagctatctctaccgtgccccctaaagtta

SEQ ID NO: 362 - DNA, 36 bp, Artificial Sequence
  Synthetic oligonucleotide
tatcgcgcgccagaagagtaagcaagtcatgaccca

SEQ ID NO: 363 - DNA, 37 bp, Artificial Sequence
  Synthetic oligonucleotide
tgaccaagggttccgctgtggggatacggttaaggga

SEQ ID NO: 364 - DNA, 36 bp, Artificial Sequence
  Synthetic oligonucleotide
agccggagctaggctagtgcgcaccagtcaaaccta

SEQ ID NO: 365 - DNA, 38 bp, Artificial Sequence
  Synthetic oligonucleotide
tcgtagtattgcaagggcaccttactcccaccatttga

SEQ ID NO: 366 - DNA, 35 bp, Artificial Sequence
  Synthetic oligonucleotide
gcgcagcttatcgccatccgcaaatccacacgctt

SEQ ID NO: 367 - DNA, 37 bp, Artificial Sequence
  Synthetic oligonucleotide
cccacgcgtgcctgtggatggcgcactcgggcataga

SEQ ID NO: 368 - DNA, 36 bp, Artificial Sequence
  Synthetic oligonucleotide
caaggagcacgtatgcactgtgcgagttggtccgta

SEQ ID NO: 369 - DNA, 36 bp, Artificial Sequence
  Synthetic oligonucleotide
agttagtctctaccgtgcccattattccgttctgaa

SEQ ID NO: 370 - DNA, 35 bp, Artificial Sequence
  Synthetic oligonucleotide
gcctgtgaaccttaaactctaccgtgcctctttgt

SEQ ID NO: 371 - DNA, 36 bp, Artificial Sequence
  Synthetic oligonucleotide
gctaaccaagtcatgggaccacgctctattgggata

SEQ ID NO: 372 - DNA, 35 bp, Artificial Sequence
  Synthetic oligonucleotide
gcaggcattattagtgtctctaccgtgctctggac

SEQ ID NO: 373 - DNA, 38 bp, Artificial Sequence
  Synthetic oligonucleotide
taccgcgcgcctggtagttgcagtattcctttgtttga

SEQ ID NO: 374 - DNA, 35 bp, Artificial Sequence
  Synthetic oligonucleotide
taacctaccaggccatgcgcaggactgtaatgcca

SEQ ID NO: 375 - DNA, 36 bp, Artificial Sequence
  Synthetic oligonucleotide
gcgccacatcgcaagcttatcgacaccccgctttca

SEQ ID NO: 376 - DNA, 35 bp, Artificial Sequence
  Synthetic oligonucleotide
cccggggctagggatcgggtgcaatcattgaattt

SEQ ID NO: 377 - DNA, 35 bp, Artificial Sequence
  Synthetic oligonucleotide
gcgagcctagcccgtaactggaaggccactactct

SEQ ID NO: 378 - DNA, 37 bp, Artificial Sequence
  Synthetic oligonucleotide
gacgggtgcgggctagcaagctttacctctattatga

SEQ ID NO: 379 - DNA, 35 bp, Artificial Sequence
  Synthetic oligonucleotide
gcgtgccaacgtgactgtgtcgcctttgctctgta

SEQ ID NO: 380 - DNA, 35 bp, Artificial Sequence
  Synthetic oligonucleotide
atcgtaggactgcgaaatcattgcgggtttattgt

SEQ ID NO: 381 - DNA, 35 bp, Artificial Sequence
  Synthetic oligonucleotide
ttacctaccaaggcacgccgttttatataaggtgg

SEQ ID NO: 382 - DNA, 35 bp, Artificial Sequence
  Synthetic oligonucleotide
ccgcgtgcttggattgtgcagtcctccctctgact

SEQ ID NO: 383 - DNA, 36 bp, Artificial Sequence
  Synthetic oligonucleotide
ttacctaccagtgcatggcgataagtctttcctata

SEQ ID NO: 384 - DNA, 35 bp, Artificial Sequence
  Synthetic oligonucleotide
gacgtctgcaggtgagcattggtctacttattggt

SEQ ID NO: 385 - DNA, 38 bp, Artificial Sequence
  Synthetic oligonucleotide
cgcgatcgtagcagtacggaggttcttctagcatatga

SEQ ID NO: 386 - DNA, 35 bp, Artificial Sequence
  Synthetic oligonucleotide
cgcgaatcgtagccgacgtgcttgggcttgcgacc

SEQ ID NO: 387 - DNA, 36 bp, Artificial Sequence
  Synthetic oligonucleotide
aagcacggtacgcacagtccgacttttgccttcaaa

SEQ ID NO: 388 - DNA, 35 bp, Artificial Sequence
  Synthetic oligonucleotide
tccggaactaggagacgtacacgccgcaatgcccc

SEQ ID NO: 389 - DNA, 35 bp, Artificial Sequence
  Synthetic oligonucleotide
ccgcggacctagcgaggacagcgcattgctagcta

SEQ ID NO: 390 - DNA, 35 bp, Artificial Sequence
  Synthetic oligonucleotide
agcccgcgtgcctgggagacgacctccgacttgcg

SEQ ID NO: 391 - DNA, 35 bp, Artificial Sequence
  Synthetic oligonucleotide
gcgtgctaaggtactgtacagtctacgcctatgtt

SEQ ID NO: 392 - DNA, 38 bp, Artificial Sequence
  Synthetic oligonucleotide
taccgcgatactgcacgtgtgcgaccgcttttccttga

SEQ ID NO: 393 - DNA, 36 bp, Artificial Sequence
  Synthetic oligonucleotide
tgacctaccaaggagagtttcatttgatctaaacta

SEQ ID NO: 394 - DNA, 35 bp, Artificial Sequence
  Synthetic oligonucleotide
cttagtgccctaagtctgcgtgactctactgtgcc

SEQ ID NO: 395 - DNA, 36 bp, Artificial Sequence
  Synthetic oligonucleotide
tgcaggcagagcccgttaagctttttatcaactcca

SEQ ID NO: 396 - DNA, 35 bp, Artificial Sequence
  Synthetic oligonucleotide
gaggcgaatcgtagctccacgtggtgccatgcaga

SEQ ID NO: 397 - DNA, 35 bp, Artificial Sequence
  Synthetic oligonucleotide
catccgctagttgcttttaatgaccaccgcttcca

SEQ ID NO: 398 - DNA, 36 bp, Artificial Sequence
  Synthetic oligonucleotide
aagcactgtacaaactggatgcgtacacttcctcca

SEQ ID NO: 399 - DNA, 35 bp, Artificial Sequence
  Synthetic oligonucleotide
gcgtgccaaggtacggaaggtccatgcaacggttt

SEQ ID NO: 400 - DNA, 36 bp, Artificial Sequence
  Synthetic oligonucleotide
cgtgtaccgcttgtaccgtacaaagtcaccttgtta

SEQ ID NO: 401 - DNA, 36 bp, Artificial Sequence
  Synthetic oligonucleotide
catgcgcgctccactggtcttaattttcctccatga

SEQ ID NO: 402 - DNA, 37 bp, Artificial Sequence
  Synthetic oligonucleotide
tctgcgtgctaagagcggccctgtagttgcgccttga

SEQ ID NO: 403 - DNA, 36 bp, Artificial Sequence
  Synthetic oligonucleotide
gcgtgccaacgattctgcgctgggctagtaccatta

SEQ ID NO: 404 - DNA, 35 bp, Artificial Sequence
  Synthetic oligonucleotide
gcgcgctaacggacaaatcccctaacctcgataaa

SEQ ID NO: 405 - DNA, 35 bp, Artificial Sequence
  Synthetic oligonucleotide
attctctaccgtgccacattttatcctctgcaaac

SEQ ID NO: 406 - DNA, 37 bp, Artificial Sequence
  Synthetic oligonucleotide
tgtctggatgccatgcgccacgcttttctcactatga

SEQ ID NO: 407 - DNA, 37 bp, Artificial Sequence
  Synthetic oligonucleotide
atcgtagtgctgcaggatctacctacattattctgga

SEQ ID NO: 408 - DNA, 36 bp, Artificial Sequence
  Synthetic oligonucleotide
gcagtctcatctgtcttctctaccgtgctcgaatca

SEQ ID NO: 409 - DNA, 35 bp, Artificial Sequence
  Synthetic oligonucleotide
gtctccggcgatatctccactgtgcccttctctat

SEQ ID NO: 410 - DNA, 35 bp, Artificial Sequence
  Synthetic oligonucleotide
gcaagtcattccagtcctgactctaccgtgcttac

SEQ ID NO: 411 - DNA, 35 bp, Artificial Sequence
  Synthetic oligonucleotide
gtgatggtcgtgcccgctttatcttacatctgctt

SEQ ID NO: 412 - DNA, 35 bp, Artificial Sequence
  Synthetic oligonucleotide
gcgtcgacgagatttttgacctctaccgtgccgac

SEQ ID NO: 413 - DNA, 35 bp, Artificial Sequence
  Synthetic oligonucleotide
tgcgtcaggcgtccgcttttaccccaccatgcttt

SEQ ID NO: 414 - DNA, 37 bp, Artificial Sequence
  Synthetic oligonucleotide
atgacacgcgcgcctgctagtactgcgctccatgcga

SEQ ID NO: 415 - DNA, 36 bp, Artificial Sequence
  Synthetic oligonucleotide
ggtcaagcattgcgactctaccgtgcctcaaactaa

SEQ ID NO: 416 - DNA, 35 bp, Artificial Sequence
  Synthetic oligonucleotide
cacgtactgtttactctaccgtgcattaaacgttt

SEQ ID NO: 417 - DNA, 35 bp, Artificial Sequence
  Synthetic oligonucleotide
agcaggcccttttcacatactctctactgtgctcc

SEQ ID NO: 418 - DNA, 35 bp, Artificial Sequence
  Synthetic oligonucleotide
taatgcaggagtgtgccaagcttttatttcatgtc

SEQ ID NO: 419 - DNA, 38 bp, Artificial Sequence
  Synthetic oligonucleotide
catgcgaccgctttacctacataggattactcttctga

SEQ ID NO: 420 - DNA, 35 bp, Artificial Sequence
  Synthetic oligonucleotide
ttgcggatctagcaacgaatggaaggaacacgtac

SEQ ID NO: 421 - DNA, 35 bp, Artificial Sequence
  Synthetic oligonucleotide
atcgtagtacccgcgggaaaaaaccacttatcatc

SEQ ID NO: 422 - DNA, 35 bp, Artificial Sequence
  Synthetic oligonucleotide
tcgctgcaccgtgtccatgcggctacaccaattcg

SEQ ID NO: 423 - DNA, 35 bp, Artificial Sequence
  Synthetic oligonucleotide
gcagaataccttactctaccgtgccattaatacat

SEQ ID NO: 424 - DNA, 38 bp, Artificial Sequence
  Synthetic oligonucleotide
gcgccgaatagcctctactgtgcgttaccctggattga

SEQ ID NO: 425 - DNA, 35 bp, Artificial Sequence
  Synthetic oligonucleotide
gcaggccgtatcactctaccgtgcaaaaagtatac

SEQ ID NO: 426 - DNA, 37 bp, Artificial Sequence
  Synthetic oligonucleotide
tactgaggcgacaattctctaccgtgcccccatttga

SEQ ID NO: 427 - DNA, 37 bp, Artificial Sequence
  Synthetic oligonucleotide
gccactagtatcctccactgtgcaaaattacaataga

SEQ ID NO: 428 - DNA, 38 bp, Artificial Sequence
  Synthetic oligonucleotide
ggtattgccgtgtagttcgttctctactgtgcctttga

SEQ ID NO: 429 - DNA, 35 bp, Artificial Sequence
  Synthetic oligonucleotide
cttgcgagattagctttatcacctgttttccgctt

SEQ ID NO: 430 - DNA, 35 bp, Artificial Sequence
  Synthetic oligonucleotide
gcacctctactgtgcccacaacgaattggactcac

SEQ ID NO: 431 - DNA, 35 bp, Artificial Sequence
  Synthetic oligonucleotide
ctccgcggtcatccactgctccattcaactcgcct

SEQ ID NO: 432 - DNA, 35 bp, Artificial Sequence
  Synthetic oligonucleotide
aatctccaccgtgcactatcttgtctcaaagtttc

SEQ ID NO: 433 - DNA, 36 bp, Artificial Sequence
  Synthetic oligonucleotide
gctagctgaattcaccatatctctactgtgcactaa

SEQ ID NO: 434 - DNA, 37 bp, Artificial Sequence
  Synthetic oligonucleotide
ctgcgtgctaagacgtacggtgtcaacatctctccga

SEQ ID NO: 435 - DNA, 35 bp, Artificial Sequence
  Synthetic oligonucleotide
gcgacgggacttagcttatattagatttcgcttct

SEQ ID NO: 436 - DNA, 36 bp, Artificial Sequence
  Synthetic oligonucleotide
catgcggaagcttactcatttttattcgattaccaa

SEQ ID NO: 437 - DNA, 35 bp, Artificial Sequence
  Synthetic oligonucleotide
taacctaccaagcaatcaccgttttggaaatcatt

SEQ ID NO: 438 - DNA, 36 bp, Artificial Sequence
  Synthetic oligonucleotide
gcccagaaaaactctactgtgcgatgacctgttaaa

SEQ ID NO: 439 - DNA, 36 bp, Artificial Sequence
  Synthetic oligonucleotide
tccgcgtgcctggaaaggtactgtccacttgaacaa

SEQ ID NO: 440 - DNA, 38 bp, Artificial Sequence
  Synthetic oligonucleotide
gagtttgcaggcttggggactctactgtgcaattttga

SEQ ID NO: 441 - DNA, 36 bp, Artificial Sequence
  Synthetic oligonucleotide
ttcgcctccaccgtgcatttctaactttatttctta

SEQ ID NO: 442 - DNA, 35 bp, Artificial Sequence
  Synthetic oligonucleotide
ccctcggactgagcactgcatacaagaagccttgc

SEQ ID NO: 443 - DNA, 37 bp, Artificial Sequence
  Synthetic oligonucleotide
cccgtgcctccccttatctctaccgtgcctcctatga

SEQ ID NO: 444 - DNA, 36 bp, Artificial Sequence
  Synthetic oligonucleotide
actcagtcatcgtacgctttccgatatcgctttata

SEQ ID NO: 445 - DNA, 35 bp, Artificial Sequence
  Synthetic oligonucleotide
tacgcgtgccaggaactgtaccagtcttatgccgc

SEQ ID NO: 446 - DNA, 36 bp, Artificial Sequence
  Synthetic oligonucleotide
gcggatttggtctctaccgtgcctactactagttaa

SEQ ID NO: 447 - DNA, 38 bp, Artificial Sequence
  Synthetic oligonucleotide
ggcacggaatgcatcgtgtcatggcgtctttcccctga

SEQ ID NO: 448 - DNA, 35 bp, Artificial Sequence
  Synthetic oligonucleotide
gtgcaggccacccagatctctactgtgcctcttac

SEQ ID NO: 449 - DNA, 35 bp, Artificial Sequence
  Synthetic oligonucleotide
atcgtaggactgcacatcgtagtttagttactcac

SEQ ID NO: 450 - DNA, 35 bp, Artificial Sequence
  Synthetic oligonucleotide
tcacctacaaatgtcaggcatatactactctatta

SEQ ID NO: 451 - DNA, 36 bp, Artificial Sequence
  Synthetic oligonucleotide
gtacaagcagtttggcgtatatctctactgtgctga

SEQ ID NO: 452 - DNA, 35 bp, Artificial Sequence
  Synthetic oligonucleotide
gataacgtttgattactccactgtgccataccctt

SEQ ID NO: 453 - DNA, 37 bp, Artificial Sequence
  Synthetic oligonucleotide
tgagcgatcgtagccaacgtactgcctttcctattga

SEQ ID NO: 454 - DNA, 35 bp, Artificial Sequence
  Synthetic oligonucleotide
gcgtcgaccacgttaatatttaccctctactgtgc

SEQ ID NO: 455 - DNA, 35 bp, Artificial Sequence
  Synthetic oligonucleotide
gcctggtcaactcgccgcaatacttttacccatcc

SEQ ID NO: 456 - DNA, 37 bp, Artificial Sequence
  Synthetic oligonucleotide
gtcaccctaaccgtattctccaccgtgccttacttga

SEQ ID NO: 457 - DNA, 35 bp, Artificial Sequence
  Synthetic oligonucleotide
gatagaattgagctctactgtgcctatctggttat

SEQ ID NO: 458 - DNA, 35 bp, Artificial Sequence
  Synthetic oligonucleotide
gtccaaattagctctctactgtgcctatccgttaa

SEQ ID NO: 459 - DNA, 37 bp, Artificial Sequence
  Synthetic oligonucleotide
gcgcacttgttcttcttggtcgcggcgtgccacgcga

SEQ ID NO: 460 - DNA, 36 bp, Artificial Sequence
  Synthetic oligonucleotide
gcggtcagagctaattctgtcaactcgccctttcta

SEQ ID NO: 461 - DNA, 36 bp, Artificial Sequence
  Synthetic oligonucleotide
gagcggaactagcgatgcgtacaaggttaatttcta

SEQ ID NO: 462 - DNA, 35 bp, Artificial Sequence
  Synthetic oligonucleotide
aacactctactgtgcctccacgatattttcatact

SEQ ID NO: 463 - DNA, 35 bp, Artificial Sequence
  Synthetic oligonucleotide
gtagtgatgccacctcaactgtgcccttgttttct

SEQ ID NO: 464 - DNA, 36 bp, Artificial Sequence
  Synthetic oligonucleotide
ttcctgcagttctattctctactgtgccctttgtta

SEQ ID NO: 465 - DNA, 37 bp, Artificial Sequence
  Synthetic oligonucleotide
gactgctctcatagtatgaactccactgtgcccttga

SEQ ID NO: 466 - DNA, 38 bp, Artificial Sequence
  Synthetic oligonucleotide
accatgcgcgcaaccttctctaccgtgcatctttttga

SEQ ID NO: 467 - DNA, 36 bp, Artificial Sequence
  Synthetic oligonucleotide
gcgttatacctccactgtgctcaattttcatctaaa

SEQ ID NO: 468 - DNA, 38 bp, Artificial Sequence
  Synthetic oligonucleotide
acgcgtgcctggtttactgcagacgagccccttcatga

SEQ ID NO: 469 - DNA, 38 bp, Artificial Sequence
  Synthetic oligonucleotide
gcacacacactttactctaccgtgccattttgaagtga

SEQ ID NO: 470 - DNA, 38 bp, Artificial Sequence
  Synthetic oligonucleotide
atctgcgggcatccatagataatactctactgtgctga

SEQ ID NO: 471 - DNA, 35 bp, Artificial Sequence
  Synthetic oligonucleotide
aaatcattcctgtggtctctctaccgtgccaatat

SEQ ID NO: 472 - DNA, 36 bp, Artificial Sequence
  Synthetic oligonucleotide
gccataacctatctctactgtgctaaaccggttaca

SEQ ID NO: 473 - DNA, 38 bp, Artificial Sequence
  Synthetic oligonucleotide
gcgactctacggaaatttgggatctctaccgtgcctga

SEQ ID NO: 474 - DNA, 35 bp, Artificial Sequence
  Synthetic oligonucleotide
acctctactgtgccgattccattgttcttccactc

SEQ ID NO: 475 - DNA, 35 bp, Artificial Sequence
  Synthetic oligonucleotide
gcgaccaagccattccaaactagccctgatttcaa

SEQ ID NO: 476 - DNA, 36 bp, Artificial Sequence
  Synthetic oligonucleotide
ctgtacggctgtctgggcctagtattcccgctttaa

SEQ ID NO: 477 - DNA, 36 bp, Artificial Sequence
  Synthetic oligonucleotide
gggaactgcaggttaaactctactgtgctatgttta

SEQ ID NO: 478 - DNA, 36 bp, Artificial Sequence
  Synthetic oligonucleotide
gcgtgggttcctctaccgtgccgaggttgttcctaa

SEQ ID NO: 479 - DNA, 38 bp, Artificial Sequence
  Synthetic oligonucleotide
tcgcggtcagcaattctccaccgtgcgattacctttga

SEQ ID NO: 480 - DNA, 36 bp, Artificial Sequence
  Synthetic oligonucleotide
tacacgtcaccttactctactgtgccgtaatcctca

SEQ ID NO: 481 - DNA, 38 bp, Artificial Sequence
  Synthetic oligonucleotide
atgcactgtacgcaggtcacgcgttttaccactactga

SEQ ID NO: 482 - DNA, 38 bp, Artificial Sequence
  Synthetic oligonucleotide
gttgcgtgctaacacacgtgactgcctatttcctatga

SEQ ID NO: 483 - DNA, 38 bp, Artificial Sequence
  Synthetic oligonucleotide
gctactgcgataactctaccgtgccactcccttgttga

SEQ ID NO: 484 - DNA, 36 bp, Artificial Sequence
  Synthetic oligonucleotide
tatccaaccactagtaagcctccaccgtgccattta

SEQ ID NO: 485 - DNA, 37 bp, Artificial Sequence
  Synthetic oligonucleotide
gctagttaccagtaacctctaccgtgcctcttctgga

SEQ ID NO: 486 - DNA, 36 bp, Artificial Sequence
  Synthetic oligonucleotide
cggcgaactcctctgtagcagtcgtgcggttcataa

SEQ ID NO: 487 - DNA, 35 bp, Artificial Sequence
  Synthetic oligonucleotide
aactgcgtgcctagtacggacttgcacccttgtgg

SEQ ID NO: 488 - DNA, 35 bp, Artificial Sequence
  Synthetic oligonucleotide
gcaggatccgttctttcaactcgcctatttctgga

SEQ ID NO: 489 - DNA, 35 bp, Artificial Sequence
  Synthetic oligonucleotide
actgcgaagccttgcatccaattactctactgtgc

SEQ ID NO: 490 - DNA, 35 bp, Artificial Sequence
  Synthetic oligonucleotide
gcgataatcttgtcattactctaccgtgccgttta

SEQ ID NO: 491 - DNA, 36 bp, Artificial Sequence
  Synthetic oligonucleotide
atgccggcctattactacctaactctactgtgctta

SEQ ID NO: 492 - DNA, 37 bp, Artificial Sequence
  Synthetic oligonucleotide
gcgatcaagcgtatttcttcttacctctactgtgcga

SEQ ID NO: 493 - DNA, 38 bp, Artificial Sequence
  Synthetic oligonucleotide
gatgacacgccctttccactccactgtgcctgttttga

SEQ ID NO: 494 - DNA, 36 bp, Artificial Sequence
  Synthetic oligonucleotide
tacatactccactgtgccacctttcccgactttcca

SEQ ID NO: 495 - DNA, 35 bp, Artificial Sequence
  Synthetic oligonucleotide
catgcaagattttgcgtaacttaattaattgcttt

SEQ ID NO: 496 - DNA, 35 bp, Artificial Sequence
  Synthetic oligonucleotide
gcactatatccgtacctaaacctccactgtgcttt

SEQ ID NO: 497 - DNA, 35 bp, Artificial Sequence
  Synthetic oligonucleotide
gcgctataactccgatgtattctccaccgtgccca

SEQ ID NO: 498 - DNA, 36 bp, Artificial Sequence
  Synthetic oligonucleotide
atcgtagtgctgcaggaaacgagattgatgcaccca

SEQ ID NO: 499 - DNA, 35 bp, Artificial Sequence
  Synthetic oligonucleotide
tgcgagtgggatttcgtccgacacctcaccatgca

SEQ ID NO: 500 - DNA, 35 bp, Artificial Sequence
  Synthetic oligonucleotide
agggtcatctagaacggttgacacgaaccgttgct

SEQ ID NO: 501 - DNA, 35 bp, Artificial Sequence
  Synthetic oligonucleotide
gctaggaaaggacccaaatctctactgtgcctacc

SEQ ID NO: 502 - DNA, 35 bp, Artificial Sequence
  Synthetic oligonucleotide
gcgaggaatacctatctctactgtgccaccaaacg

SEQ ID NO: 503 - DNA, 36 bp, Artificial Sequence
  Synthetic oligonucleotide
gccgtttactctaccgtgccgtatcgatttccatta

SEQ ID NO: 504 - DNA, 35 bp, Artificial Sequence
  Synthetic oligonucleotide
aggtcgtgcgtcccgttcaactagccctgttctca

SEQ ID NO: 505 - DNA, 35 bp, Artificial Sequence
  Synthetic oligonucleotide
cattgcgttctggctttcgttcattttcgctttac

SEQ ID NO: 506 - DNA, 35 bp, Artificial Sequence
  Synthetic oligonucleotide
gcactcatcgcggattatctccaccgtgccgacct

SEQ ID NO: 507 - DNA, 35 bp, Artificial Sequence
  Synthetic oligonucleotide
catgccagctttaactttgagatctgttagttttc

SEQ ID NO: 508 - DNA, 36 bp, Artificial Sequence
  Synthetic oligonucleotide
gccaggatctcaactgtgccattgcctttttctgaa

SEQ ID NO: 509 - DNA, 38 bp, Artificial Sequence
  Synthetic oligonucleotide
ttacctccaccgtgccaatcactgtttgatcgccttga

SEQ ID NO: 510 - DNA, 36 bp, Artificial Sequence
  Synthetic oligonucleotide
taacctaccaagtccaatttggagtctctacgatta

SEQ ID NO: 511 - DNA, 35 bp, Artificial Sequence
  Synthetic oligonucleotide
gcctcaacttgagtttctatcattctccactgtgc

SEQ ID NO: 512 - DNA, 37 bp, Artificial Sequence
  Synthetic oligonucleotide
catagctgcatactctaccgtgcactcattccctaga

SEQ ID NO: 513 - DNA, 37 bp, Artificial Sequence
  Synthetic oligonucleotide
gacatcaactgcgaactcccctgagtgtgatatcgga

SEQ ID NO: 514 - DNA, 35 bp, Artificial Sequence
  Synthetic oligonucleotide
tatctccaccgtgcccgttaataatctgatctgaa

SEQ ID NO: 515 - DNA, 36 bp, Artificial Sequence
  Synthetic oligonucleotide
tgcgtgccaaacggactcaaggtaccatgcatcaca

SEQ ID NO: 516 - DNA, 36 bp, Artificial Sequence
  Synthetic oligonucleotide
acatagactgccgagcgttcttctctaccgtgccca

SEQ ID NO: 517 - DNA, 36 bp, Artificial Sequence
  Synthetic oligonucleotide
atgaccgaggtacccgacggcctcataggatccata

SEQ ID NO: 518 - DNA, 35 bp, Artificial Sequence
  Synthetic oligonucleotide
gcggttatggggttctcaactgtgccaatctccat

SEQ ID NO: 519 - DNA, 35 bp, Artificial Sequence
  Synthetic oligonucleotide
gggtcatgcgatttctttgttcactcaactcgccc

SEQ ID NO: 520 - DNA, 37 bp, Artificial Sequence
  Synthetic oligonucleotide
gctgttgcgtccatatctccactgtgcttttggttga

SEQ ID NO: 521 - DNA, 35 bp, Artificial Sequence
  Synthetic oligonucleotide
atgcgtgccaatacgacgtcaggccatgaagccat

SEQ ID NO: 522 - DNA, 36 bp, Artificial Sequence
  Synthetic oligonucleotide
atgaactggtggacctttatcctctactgtgcaaaa

SEQ ID NO: 523 - DNA, 35 bp, Artificial Sequence
  Synthetic oligonucleotide
ccgcgtgcctggaccttgcacgacatgcggcaata

SEQ ID NO: 524 - DNA, 38 bp, Artificial Sequence
  Synthetic oligonucleotide
tctgcgggctagtatctaatgatctctaccgtgcttga

SEQ ID NO: 525 - DNA, 34 bp, Artificial Sequence
  Synthetic oligonucleotide
catgcggaggcttttaacaccatgcattctcacc

SEQ ID NO: 526 - DNA, 37 bp, Artificial Sequence
  Synthetic oligonucleotide
ttacgtatctgagcgctagtaccagtacctcgagtga

SEQ ID NO: 527 - DNA, 35 bp, Artificial Sequence
  Synthetic oligonucleotide
agtcaggcccgcttttatttttgtggttatttttg

SEQ ID NO: 528 - DNA, 38 bp, Artificial Sequence
  Synthetic oligonucleotide
cttgccctccgacatgaactctactgtgcaacctatga

SEQ ID NO: 529 - DNA, 32 bp, Artificial Sequence
  Synthetic oligonucleotide
atcgcgtgccagaacgtaactcgcccatcgac

SEQ ID NO: 530 - DNA, 35 bp, Artificial Sequence
  Synthetic oligonucleotide
tgacgcgtgcttggcaacgtggcaggacaattatt

SEQ ID NO: 531 - DNA, 36 bp, Artificial Sequence
  Synthetic oligonucleotide
accgcgtgattggaagatactgcgtcttcgatttaa

SEQ ID NO: 532 - DNA, 35 bp, Artificial Sequence
  Synthetic oligonucleotide
gtgtgctgaccttagcaaccgaactgaggccctac

SEQ ID NO: 533 - DNA, 36 bp, Artificial Sequence
  Synthetic oligonucleotide
gcgcgccaaggtactgcggatagcgcattggacaca

SEQ ID NO: 534 - DNA, 35 bp, Artificial Sequence
  Synthetic oligonucleotide
taccgacgcgctattttctactctactgtgctcat

SEQ ID NO: 535 - DNA, 35 bp, Artificial Sequence
  Synthetic oligonucleotide
aaccgaacgtccgataaactcgccctactaatact

SEQ ID NO: 536 - DNA, 35 bp, Artificial Sequence
  Synthetic oligonucleotide
accaggtccactttcggtgatagaccctgcacaca

SEQ ID NO: 537 - DNA, 35 bp, Artificial Sequence
  Synthetic oligonucleotide
taaattgcccgtttgttctctactgtgccactccg

SEQ ID NO: 538 - DNA, 38 bp, Artificial Sequence
  Synthetic oligonucleotide
gccaccttgactctgatccaactctactgtgccattga

SEQ ID NO: 539 - DNA, 38 bp, Artificial Sequence
  Synthetic oligonucleotide
cgtgccaccgctggcttcctacttcgctttaactatga

SEQ ID NO: 540 - DNA, 35 bp, Artificial Sequence
  Synthetic oligonucleotide
tgttctctactgtgcccgataacacgcttttgttc

SEQ ID NO: 541 - DNA, 36 bp, Artificial Sequence
  Synthetic oligonucleotide
ctggtgctgcaccgtgtcacctatctttacgcatta

SEQ ID NO: 542 - DNA, 36 bp, Artificial Sequence
  Synthetic oligonucleotide
atcgtagtacgaagctagccataacctgttatctca

SEQ ID NO: 543 - DNA, 38 bp, Artificial Sequence
  Synthetic oligonucleotide
gcgtgttttatctctactgtgcgaacgtttggaattga

SEQ ID NO: 544 - DNA, 38 bp, Artificial Sequence
  Synthetic oligonucleotide
agctaggggtatctctactgtgcgattcttccgggtga

SEQ ID NO: 545 - DNA, 36 bp, Artificial Sequence
  Synthetic oligonucleotide
cgtgcccgctttattctccctggcttattggtccca

SEQ ID NO: 546 - DNA, 38 bp, Artificial Sequence
  Synthetic oligonucleotide
gatgcgccgctttacactcttgttcttacccgctttga

SEQ ID NO: 547 - DNA, 35 bp, Artificial Sequence
  Synthetic oligonucleotide
ggggcatgtaccaaccgttatttactctactgtgc

SEQ ID NO: 548 - DNA, 35 bp, Artificial Sequence
  Synthetic oligonucleotide
gcatcgtgtccatgcccaaatggttcgtcttttta

SEQ ID NO: 549 - DNA, 38 bp, Artificial Sequence
  Synthetic oligonucleotide
atgcactggacgcgcatgtcgtttcatttctccattga

SEQ ID NO: 550 - DNA, 34 bp, Artificial Sequence
  Synthetic oligonucleotide
aagcacgggctgcattcgattcaggtaaacaatt

SEQ ID NO: 551 - DNA, 37 bp, Artificial Sequence
  Synthetic oligonucleotide
acacccgcatgaggtatcctgtggatcgtgggacgga

SEQ ID NO: 552 - DNA, 35 bp, Artificial Sequence
  Synthetic oligonucleotide
gccagctttcgttcatataccactatcgctttgta

SEQ ID NO: 553 - DNA, 38 bp, Artificial Sequence
  Synthetic oligonucleotide
acagtcataacagactccgctgcgtgctaagcggatga

SEQ ID NO: 554 - DNA, 36 bp, Artificial Sequence
  Synthetic oligonucleotide
gcgcgctaacgggtatctgcaggtcctactagttta

SEQ ID NO: 555 - DNA, 35 bp, Artificial Sequence
  Synthetic oligonucleotide
atgcacctgtctgtcagtccccgctaggccatatt

SEQ ID NO: 556 - DNA, 38 bp, Artificial Sequence
  Synthetic oligonucleotide
ccatgcgcccggttgagatttaacggatctcgctttga

SEQ ID NO: 557 - DNA, 35 bp, Artificial Sequence
  Synthetic oligonucleotide
gcacacctcgctttaacacttgtaactacgcttca

SEQ ID NO: 558 - DNA, 35 bp, Artificial Sequence
  Synthetic oligonucleotide
tcacctactaaggactgatagctgcctacattgtt

SEQ ID NO: 559 - DNA, 36 bp, Artificial Sequence
  Synthetic oligonucleotide
ccacgagtctaggggcgtaacgcagtaaggcataca

SEQ ID NO: 560 - DNA, 38 bp, Artificial Sequence
  Synthetic oligonucleotide
acatgcgtgctaaggtactactggtgtcgaacctttga

SEQ ID NO: 561 - DNA, 35 bp, Artificial Sequence
  Synthetic oligonucleotide
atcgtagtacatacagtgcgtttcgtaaattgcct

SEQ ID NO: 562 - DNA, 35 bp, Artificial Sequence
  Synthetic oligonucleotide
gcgccccgactgccactagcttttaattctcgctt

SEQ ID NO: 563 - DNA, 36 bp, Artificial Sequence
  Synthetic oligonucleotide
tgctagctggcccatactcaactgtgcgttactcaa

SEQ ID NO: 564 - DNA, 35 bp, Artificial Sequence
  Synthetic oligonucleotide
actctgcatccttcaactctactgtgcggttattt

SEQ ID NO: 565 - DNA, 38 bp, Artificial Sequence
  Synthetic oligonucleotide
gctaactgcagggcacacaatctcttaaggcttaatga

SEQ ID NO: 566 - DNA, 35 bp, Artificial Sequence
  Synthetic oligonucleotide
gcgtgggcctggtctttactactaaacaaattggt

SEQ ID NO: 567 - DNA, 35 bp, Artificial Sequence
  Synthetic oligonucleotide
gatcgtaacgcactgagggtcaggcattacccgcc

SEQ ID NO: 568 - DNA, 37 bp, Artificial Sequence
  Synthetic oligonucleotide
gcccggggctaggggaaagaacctgccggtcatggga

SEQ ID NO: 569 - DNA, 35 bp, Artificial Sequence
  Synthetic oligonucleotide
gcgacctagggtaacgatcgtagttcacccataat

SEQ ID NO: 570 - DNA, 36 bp, Artificial Sequence
  Synthetic oligonucleotide
ttacctaccacagtctccgcctcgttatccttatca

SEQ ID NO: 571 - DNA, 36 bp, Artificial Sequence
  Synthetic oligonucleotide
gccgcgtgcctggccgtggtgcatcactaagttgaa

SEQ ID NO: 572 - DNA, 35 bp, Artificial Sequence
  Synthetic oligonucleotide
ggcgcgcgctagccatacgaactgcttgaacattt

SEQ ID NO: 573 - DNA, 37 bp, Artificial Sequence
  Synthetic oligonucleotide
tgcgaatcgtagccatcgtccactgctgatttgcgga

SEQ ID NO: 574 - DNA, 36 bp, Artificial Sequence
  Synthetic oligonucleotide
gcgaccgattcttctctcaaacgcttacttctatga

SEQ ID NO: 575 - DNA, 35 bp, Artificial Sequence
  Synthetic oligonucleotide
gccaaatgatctccactgtgcgaaatgggcttttt

SEQ ID NO: 576 - DNA, 38 bp, Artificial Sequence
  Synthetic oligonucleotide
tgagcacacaatggacgtgacaccaatctttcttatga

SEQ ID NO: 577 - DNA, 36 bp, Artificial Sequence
  Synthetic oligonucleotide
tcatcacgcgctagtgaacgtgttgtagcaccccta

SEQ ID NO: 578 - DNA, 36 bp, Artificial Sequence
  Synthetic oligonucleotide
tcatgtgcgtgccaactgacgaggtgcaggctagcc

SEQ ID NO: 579 - DNA, 38 bp, Artificial Sequence
  Synthetic oligonucleotide
atcgtagctgctgcagtcccctgtcttaatatccctga

SEQ ID NO: 580 - DNA, 36 bp, Artificial Sequence
  Synthetic oligonucleotide
cgtatcgtagacgttacggaaggagataatgcgcaa

SEQ ID NO: 581 - DNA, 36 bp, Artificial Sequence
  Synthetic oligonucleotide
cttgccagctttccttgtcttcgctttcattacata

SEQ ID NO: 582 - DNA, 38 bp, Artificial Sequence
  Synthetic oligonucleotide
gctgtcattgaatctctactgtgcgatccactttttga

SEQ ID NO: 583 - DNA, 38 bp, Artificial Sequence
  Synthetic oligonucleotide
catgcgccagcttcttctgattttatctatctctatga

SEQ ID NO: 584 - DNA, 36 bp, Artificial Sequence
  Synthetic oligonucleotide
ccatgcccgcttaagcttcttttctatgtttctacg

SEQ ID NO: 585 - DNA, 35 bp, Artificial Sequence
  Synthetic oligonucleotide
tagcaggagtaccctccaccgtgcacattgtttcc

SEQ ID NO: 586 - DNA, 37 bp, Artificial Sequence
  Synthetic oligonucleotide
catgcccgctttgtttctccgctttttggtattccga

SEQ ID NO: 587 - DNA, 36 bp, Artificial Sequence
  Synthetic oligonucleotide
atgcacgtcgaaaggcatgcggtacaactcctatga

SEQ ID NO: 588 - DNA, 35 bp, Artificial Sequence
  Synthetic oligonucleotide
agacagcaggcatagcggggaacctctaccgtgcc

SEQ ID NO: 589 - DNA, 35 bp, Artificial Sequence
  Synthetic oligonucleotide
aagtaacgcgggttacaactttttctccaccgtgc

SEQ ID NO: 590 - DNA, 36 bp, Artificial Sequence
  Synthetic oligonucleotide
acagtctcatgcccgcttttaatcataccgcttaca

SEQ ID NO: 591 - DNA, 38 bp, Artificial Sequence
  Synthetic oligonucleotide
gcgcccgaccattccctaagcttttgaccccactatga

SEQ ID NO: 592 - DNA, 37 bp, Artificial Sequence
  Synthetic oligonucleotide
gcgacgactatcgcttgttcttgaatacctcgcttta

SEQ ID NO: 593 - DNA, 34 bp, Artificial Sequence
  Synthetic oligonucleotide
aaactctactgtgcctcagtttcaaaccggttct

SEQ ID NO: 594 - DNA, 35 bp, Artificial Sequence
  Synthetic oligonucleotide
gtcgtagtactgcgaaatgggccatgcgcaaactt

SEQ ID NO: 595 - DNA, 35 bp, Artificial Sequence
  Synthetic oligonucleotide
cgtgcggatttctccaccgtgcttttgacctctga

SEQ ID NO: 596 - DNA, 38 bp, Artificial Sequence
  Synthetic oligonucleotide
gactgcgacctacacttatttgctctactgtgccttga

SEQ ID NO: 597 - DNA, 35 bp, Artificial Sequence
  Synthetic oligonucleotide
catgcggcttctaccaggtcaaactagccccaatt

SEQ ID NO: 598 - DNA, 36 bp, Artificial Sequence
  Synthetic oligonucleotide
aaccggagctaggtacgtgtctgtcaggcatgaaga

SEQ ID NO: 599 - DNA, 36 bp, Artificial Sequence
  Synthetic oligonucleotide
atgagtccgcgtgcctggacctttacccccgacgaa

SEQ ID NO: 600 - DNA, 38 bp, Artificial Sequence
  Synthetic oligonucleotide
catgccgtacgcttattggatacaccatcgctttttga

SEQ ID NO: 601 - DNA, 37 bp, Artificial Sequence
  Synthetic oligonucleotide
gcgttggtgttcctctctactgtgcctgattttttga

SEQ ID NO: 602 - DNA, 37 bp, Artificial Sequence
  Synthetic oligonucleotide
atcgtagtactgcacgggtgccacgtgtcttcccaga

SEQ ID NO: 603 - DNA, 35 bp, Artificial Sequence
  Synthetic oligonucleotide
aggcacgtacaggcatcgaccgctttcttctttcc

SEQ ID NO: 604 - DNA, 36 bp, Artificial Sequence
  Synthetic oligonucleotide
gccatgcgggataatattaaatcctctaccgtgcca

SEQ ID NO: 605 - DNA, 37 bp, Artificial Sequence
  Synthetic oligonucleotide
tctgccatgcggctcattccgaaactctactgtgcga

SEQ ID NO: 606 - DNA, 35 bp, Artificial Sequence
  Synthetic oligonucleotide
ttttgcgattcctctactgtgccttctggttttgt

SEQ ID NO: 607 - DNA, 35 bp, Artificial Sequence
  Synthetic oligonucleotide
ctgcagcaatcatgcaggctttcatcgctttcatc

SEQ ID NO: 608 - DNA, 35 bp, Artificial Sequence
  Synthetic oligonucleotide
tcacctaccaagatctctcgcgccctatagtttct

SEQ ID NO: 609 - DNA, 35 bp, Artificial Sequence
  Synthetic oligonucleotide
caccgcgtgccaggggatcggaatgatatcaactg

SEQ ID NO: 610 - DNA, 36 bp, Artificial Sequence
  Synthetic oligonucleotide
taaactaccaagggcatgccaccatctactacatga

SEQ ID NO: 611 - DNA, 35 bp, Artificial Sequence
  Synthetic oligonucleotide
atcgtagtactgaaaagcgggatccagttctaatt

SEQ ID NO: 612 - DNA, 35 bp, Artificial Sequence
  Synthetic oligonucleotide
gaaggcaagcacccccctgctcaactagccaacaa

SEQ ID NO: 613 - DNA, 38 bp, Artificial Sequence
  Synthetic oligonucleotide
ctgccctcgttctccaccgtgcccactttgtaaactga

SEQ ID NO: 614 - DNA, 36 bp, Artificial Sequence
  Synthetic oligonucleotide
gatgcaagggcccgttagtactggggtctaattaaa

SEQ ID NO: 615 - DNA, 38 bp, Artificial Sequence
  Synthetic oligonucleotide
catgcgatggtcttgcacttggttagtaatctccttga

SEQ ID NO: 616 - DNA, 35 bp, Artificial Sequence
  Synthetic oligonucleotide
gtgcgcgctaacacggagagtctcaacttaacctg

SEQ ID NO: 617 - DNA, 36 bp, Artificial Sequence
  Synthetic oligonucleotide
aacaaattgccgtggggacgtggtcatgcggattta

SEQ ID NO: 618 - DNA, 36 bp, Artificial Sequence
  Synthetic oligonucleotide
gcgtggcacgaagctttctatttttacttgattcca

SEQ ID NO: 619 - DNA, 35 bp, Artificial Sequence
  Synthetic oligonucleotide
caatgccagcttacgtttatatcccaattcgcttt

SEQ ID NO: 620 - DNA, 35 bp, Artificial Sequence
  Synthetic oligonucleotide
aacggtcatgccagcttttggtacttagttctcct

SEQ ID NO: 621 - DNA, 37 bp, Artificial Sequence
  Synthetic oligonucleotide
gaacgcaggcatccgcattagctttttccttctatga

SEQ ID NO: 622 - DNA, 36 bp, Artificial Sequence
  Synthetic oligonucleotide
gcgccccgtacagcatcgtgtcatggacctacccta

SEQ ID NO: 623 - DNA, 37 bp, Artificial Sequence
  Synthetic oligonucleotide
tcgtagtaactgcaggatccactccactctcatttga

SEQ ID NO: 624 - DNA, 35 bp, Artificial Sequence
  Synthetic oligonucleotide
atgcactgtacgagcgggatcgctagtttacaaca

SEQ ID NO: 625 - DNA, 35 bp, Artificial Sequence
  Synthetic oligonucleotide
gcgcgctaacgtcactgcacatccagggccctatc

SEQ ID NO: 626 - DNA, 38 bp, Artificial Sequence
  Synthetic oligonucleotide
acccgatcgtagggaacgtaccgataacaaaattatga

SEQ ID NO: 627 - DNA, 36 bp, Artificial Sequence
  Synthetic oligonucleotide
actggtaggcatcgacctcaagctttctcaacatca

SEQ ID NO: 628 - DNA, 35 bp, Artificial Sequence
  Synthetic oligonucleotide
acacctaccaggtcacgcgttcgaacttcacttaa

SEQ ID NO: 629 - DNA, 35 bp, Artificial Sequence
  Synthetic oligonucleotide
accgcgcgctagggacgggatgcttcggcctgtta

SEQ ID NO: 630 - DNA, 35 bp, Artificial Sequence
  Synthetic oligonucleotide
taagcaactagggtgctgtcatcgcgatctctttt

SEQ ID NO: 631 - DNA, 35 bp, Artificial Sequence
  Synthetic oligonucleotide
atcccgggactagggcgacgtgatgcatctctcat

SEQ ID NO: 632 - DNA, 35 bp, Artificial Sequence
  Synthetic oligonucleotide
gacaaggtctgcccgcttcccacactacgcttaca

SEQ ID NO: 633 - DNA, 36 bp, Artificial Sequence
  Synthetic oligonucleotide
gcgcccgcttctcataactatggctttattctcaca

SEQ ID NO: 634 - DNA, 36 bp, Artificial Sequence
  Synthetic oligonucleotide
tgctccgggcctaggagattctacgtacgcaatgca

SEQ ID NO: 635 - DNA, 36 bp, Artificial Sequence
  Synthetic oligonucleotide
gccagactcgccccctatttttttggaactcgccta

SEQ ID NO: 636 - DNA, 38 bp, Artificial Sequence
  Synthetic oligonucleotide
gcatccgttaaactcgcctctcaaatcgaatcccatga

SEQ ID NO: 637 - DNA, 35 bp, Artificial Sequence
  Synthetic oligonucleotide
ctcgcagcatgcgaaggctttactcacaactatcg

SEQ ID NO: 638 - DNA, 37 bp, Artificial Sequence
  Synthetic oligonucleotide
ccgtgcgaacgttatgcgaccatgcgctctctcttga

SEQ ID NO: 639 - DNA, 38 bp, Artificial Sequence
  Synthetic oligonucleotide
gtctagccgcttttgttatgatattcttctctttatga

SEQ ID NO: 640 - DNA, 36 bp, Artificial Sequence
  Synthetic oligonucleotide
gcgtgccaacgtaccttccttatctggtgaactaca

SEQ ID NO: 641 - DNA, 35 bp, Artificial Sequence
  Synthetic oligonucleotide
gtgcgcgctaacactcctctcggtcatttgctgga

SEQ ID NO: 642 - DNA, 35 bp, Artificial Sequence
  Synthetic oligonucleotide
agcgcgtgattgcacgtgactgcacttctaatctt

SEQ ID NO: 643 - DNA, 35 bp, Artificial Sequence
  Synthetic oligonucleotide
tccgaacctaggaagccggatggaacatgcgccca

SEQ ID NO: 644 - DNA, 35 bp, Artificial Sequence
  Synthetic oligonucleotide
catcgcaagctttaatacaaaccctatccattgct

SEQ ID NO: 645 - DNA, 36 bp, Artificial Sequence
  Synthetic oligonucleotide
actgcgtgccgagtacaggactacagttaatggcaa

SEQ ID NO: 646 - DNA, 35 bp, Artificial Sequence
  Synthetic oligonucleotide
ccatgcgtgcctatggacgtccccaaacattgtct

SEQ ID NO: 647 - DNA, 35 bp, Artificial Sequence
  Synthetic oligonucleotide
tatcgcgggcaggcgattcgcttgtatttaatccg

SEQ ID NO: 648 - DNA, 36 bp, Artificial Sequence
  Synthetic oligonucleotide
actgcaccgtgtcatggcgagagctcacctaattca

SEQ ID NO: 649 - DNA, 35 bp, Artificial Sequence
  Synthetic oligonucleotide
gacatgcaaaggcccttaattgactccactgtgcc

SEQ ID NO: 650 - DNA, 35 bp, Artificial Sequence
  Synthetic oligonucleotide
catttgcgtgcctaaatgcggcgcgggctggcgac

SEQ ID NO: 651 - DNA, 35 bp, Artificial Sequence
  Synthetic oligonucleotide
gctggccaatgtatctcaaccgtgccgaaattatt

SEQ ID NO: 652 - DNA, 35 bp, Artificial Sequence
  Synthetic oligonucleotide
tgctaggactagccggttttctattactctatttt

SEQ ID NO: 653 - DNA, 36 bp, Artificial Sequence
  Synthetic oligonucleotide
tccggagctaggaactacggcgatctctgcgcctaa

SEQ ID NO: 654 - DNA, 35 bp, Artificial Sequence
  Synthetic oligonucleotide
gcctagtggacaccccgattcgaccttttttgctt

SEQ ID NO: 655 - DNA, 36 bp, Artificial Sequence
  Synthetic oligonucleotide
agtggaccaacggatcgcgtgccaggccgatgggca

SEQ ID NO: 656 - DNA, 36 bp, Artificial Sequence
  Synthetic oligonucleotide
gataaccagtgtcatgcaaacactatacattcctta

SEQ ID NO: 657 - DNA, 35 bp, Artificial Sequence
  Synthetic oligonucleotide
actgcacaacattgattctgacaggttgacaccaa

SEQ ID NO: 658 - DNA, 38 bp, Artificial Sequence
  Synthetic oligonucleotide
agtgcgcaatagtgcgacaagcttctatccatttttga

SEQ ID NO: 659 - DNA, 36 bp, Artificial Sequence
  Synthetic oligonucleotide
gctgacgttcgtagtccatgtacgggctgtcatcaa

SEQ ID NO: 660 - DNA, 36 bp, Artificial Sequence
  Synthetic oligonucleotide
tcgtgcagtatcgcggtcatgtcacactcccgtaca

SEQ ID NO: 661 - DNA, 36 bp, Artificial Sequence
  Synthetic oligonucleotide
agcacgatcgtagtgcgaatcgaacggggtctgcga

SEQ ID NO: 662 - DNA, 36 bp, Artificial Sequence
  Synthetic oligonucleotide
gcgcgctaacgactgtaggaatccaattctgaccga

SEQ ID NO: 663 - DNA, 38 bp, Artificial Sequence
  Synthetic oligonucleotide
agtgactgcgggcactgcgatcgcttttgattatttga

SEQ ID NO: 664 - DNA, 36 bp, Artificial Sequence
  Synthetic oligonucleotide
agccacccatcctcaaccgtgccataatcgcctcta

SEQ ID NO: 665 - DNA, 35 bp, Artificial Sequence
  Synthetic oligonucleotide
gcctctaccgtgcctgtgacccaccagttttttat

SEQ ID NO: 666 - DNA, 35 bp, Artificial Sequence
  Synthetic oligonucleotide
tcgtagtacgcaggtggtcaagcacgatttcttta

SEQ ID NO: 667 - DNA, 38 bp, Artificial Sequence
  Synthetic oligonucleotide
tcagtacgcactagtacattgccaagctttccacatga

SEQ ID NO: 668 - DNA, 35 bp, Artificial Sequence
  Synthetic oligonucleotide
aagcggaactagccaaggcaagggaaatgccctca

SEQ ID NO: 669 - DNA, 35 bp, Artificial Sequence
  Synthetic oligonucleotide
ggaccgaatctaggctgtactgtgcacgcatcgcc

SEQ ID NO: 670 - DNA, 35 bp, Artificial Sequence
  Synthetic oligonucleotide
ttacctacctggtcaggcataacatttagttcctc

SEQ ID NO: 671 - DNA, 38 bp, Artificial Sequence
  Synthetic oligonucleotide
aagaccgcgtgccaggtcaacgtacgcacatgcaatga

SEQ ID NO: 672 - DNA, 38 bp, Artificial Sequence
  Synthetic oligonucleotide
atcgtagtactgtagggcctctgtttcactcaatatga

SEQ ID NO: 673 - DNA, 35 bp, Artificial Sequence
  Synthetic oligonucleotide
aggacaggcgggttttgctgacgttgtctatactg

SEQ ID NO: 674 - DNA, 35 bp, Artificial Sequence
  Synthetic oligonucleotide
tactccactgtgcatccgatcttcttccccaactc

SEQ ID NO: 675 - DNA, 37 bp, Artificial Sequence
  Synthetic oligonucleotide
tctccactgtgcccgtaacttttcttttactgtccga

SEQ ID NO: 676 - DNA, 36 bp, Artificial Sequence
  Synthetic oligonucleotide
ccgggcctaggaggactgcatgacccctttaaccaa

SEQ ID NO: 677 - DNA, 35 bp, Artificial Sequence
  Synthetic oligonucleotide
ccgggcctaggacggttccacagtcagcgaatcct

SEQ ID NO: 678 - DNA, 35 bp, Artificial Sequence
  Synthetic oligonucleotide
aacgcgcgcttgggatgtatgcatcatctagattt

SEQ ID NO: 679 - DNA, 35 bp, Artificial Sequence
  Synthetic oligonucleotide
cacgacgcaccttaccgctttctatttttccgctt

SEQ ID NO: 680 - DNA, 35 bp, Artificial Sequence
  Synthetic oligonucleotide
gcacttggccgctttaactactacgctttgtcctc

SEQ ID NO: 681 - DNA, 37 bp, Artificial Sequence
  Synthetic oligonucleotide
cgtgtacgccagtgccgtgcagtcaggcgatctatga

SEQ ID NO: 682 - DNA, 36 bp, Artificial Sequence
  Synthetic oligonucleotide
cttaggcaatgacgtgcccttatgcgacttcgccca

SEQ ID NO: 683 - DNA, 38 bp, Artificial Sequence
  Synthetic oligonucleotide
gcaccgtttccaccgcgcgtggatcttcccaactttga

SEQ ID NO: 684 - DNA, 35 bp, Artificial Sequence
  Synthetic oligonucleotide
gcggacctagcttacggactgtaattaacgttttt

SEQ ID NO: 685 - DNA, 38 bp, Artificial Sequence
  Synthetic oligonucleotide
atgcgcatcccctctaccgtgcaattttccatccctga

SEQ ID NO: 686 - DNA, 36 bp, Artificial Sequence
  Synthetic oligonucleotide
gacgcgcgccagacagggaactgcacaggcatgcca

SEQ ID NO: 687 - DNA, 35 bp, Artificial Sequence
  Synthetic oligonucleotide
ccgagactaggacccctgtgttcatgcgctatttc

SEQ ID NO: 688 - DNA, 35 bp, Artificial Sequence
  Synthetic oligonucleotide
gctaactgcaggcacagcctaagaaacctcatgta

SEQ ID NO: 689 - DNA, 38 bp, Artificial Sequence
  Synthetic oligonucleotide
tgcagtctagcccgcttaatgtattccttgattcttga

SEQ ID NO: 690 - DNA, 35 bp, Artificial Sequence
  Synthetic oligonucleotide
gcgtgctagcgtactgcatggatactttggtagct

SEQ ID NO: 691 - DNA, 38 bp, Artificial Sequence
  Synthetic oligonucleotide
tcgtagtacagcagaccctccctacctacaattggtga

SEQ ID NO: 692 - DNA, 35 bp, Artificial Sequence
  Synthetic oligonucleotide
gccgctgactgagttctctctactgtgcgtatttt

SEQ ID NO: 693 - DNA, 36 bp, Artificial Sequence
  Synthetic oligonucleotide
gccagcagccctgaactcctctgaagcatcgccgca

SEQ ID NO: 694 - DNA, 35 bp, Artificial Sequence
  Synthetic oligonucleotide
taggtctgcacatgcgctaggcttttcttaccctg

SEQ ID NO: 695 - DNA, 38 bp, Artificial Sequence
  Synthetic oligonucleotide
gcgacgccccacgctttgacctaaacccatcaatatga

SEQ ID NO: 696 - DNA, 38 bp, Artificial Sequence
  Synthetic oligonucleotide
cgctacagacatgcgcatcttgacttatattcaattga

SEQ ID NO: 697 - DNA, 35 bp, Artificial Sequence
  Synthetic oligonucleotide
atgcactactgcgagcgagcacaggtttcctcctt

SEQ ID NO: 698 - DNA, 38 bp, Artificial Sequence
  Synthetic oligonucleotide
aacgcgtgccagagaagaaccgcggtctcgccccatga

SEQ ID NO: 699 - DNA, 35 bp, Artificial Sequence
  Synthetic oligonucleotide
cattgcgaactagctttcttctccttctagctttt

SEQ ID NO: 700 - DNA, 35 bp, Artificial Sequence
  Synthetic oligonucleotide
catgccctagaacattgctttaacactttcgcttt

SEQ ID NO: 701 - DNA, 38 bp, Artificial Sequence
  Synthetic oligonucleotide
tcatgcgatcaatcgctctgcgtgcctagatcgattga

SEQ ID NO: 702 - DNA, 34 bp, Artificial Sequence
  Synthetic oligonucleotide
gcgaccgtggcttcctacctccaagctttccgac

SEQ ID NO: 703 - DNA, 36 bp, Artificial Sequence
  Synthetic oligonucleotide
gcgtgctaacgtactagaccaaagcgagtaacatca

SEQ ID NO: 704 - DNA, 37 bp, Artificial Sequence
  Synthetic oligonucleotide
tcacgcgcgcttgggattacgtacaatcatcaatgga

SEQ ID NO: 705 - DNA, 36 bp, Artificial Sequence
  Synthetic oligonucleotide
gcactacaccctattcccgcgtaggtccccgagcct

SEQ ID NO: 706 - DNA, 36 bp, Artificial Sequence
  Synthetic oligonucleotide
taactccactgtgcgatcattgtttttcttttttga

SEQ ID NO: 707 - DNA, 35 bp, Artificial Sequence
  Synthetic oligonucleotide
atcgtagtactggtactcctgccctatttcgataa

SEQ ID NO: 708 - DNA, 35 bp, Artificial Sequence
  Synthetic oligonucleotide
acactctgcagcctagaactctaccgtgctaattt

SEQ ID NO: 709 - DNA, 35 bp, Artificial Sequence
  Synthetic oligonucleotide
gtgcgcgcgctagcatgcgtaatcatgtcatttaa

SEQ ID NO: 710 - DNA, 35 bp, Artificial Sequence
  Synthetic oligonucleotide
tcaatctcaactgtgcttccctggtttttagtttc

SEQ ID NO: 711 - DNA, 38 bp, Artificial Sequence
  Synthetic oligonucleotide
gtcctgcgtgctaaggaccctaagcttcatgcgtatga

SEQ ID NO: 712 - DNA, 36 bp, Artificial Sequence
  Synthetic oligonucleotide
tcgccgcccaaggatccctctactgtgccactttaa

SEQ ID NO: 713 - DNA, 35 bp, Artificial Sequence
  Synthetic oligonucleotide
gcgtgcctacgtaacgttcatgcggatggaccgat

SEQ ID NO: 714 - DNA, 35 bp, Artificial Sequence
  Synthetic oligonucleotide
cgtgccttggccggaccagtccttttgatcactac

SEQ ID NO: 715 - DNA, 35 bp, Artificial Sequence
  Synthetic oligonucleotide
caggcatgacgatttggcttaacttcccttgctta

SEQ ID NO: 716 - DNA, 35 bp, Artificial Sequence
  Synthetic oligonucleotide
tatgcgtatccaatcgcttttcaattcctatgctt

SEQ ID NO: 717 - DNA, 35 bp, Artificial Sequence
  Synthetic oligonucleotide
ccgcgtgccaggcgtaatgtaggcaggccctttat

SEQ ID NO: 718 - DNA, 35 bp, Artificial Sequence
  Synthetic oligonucleotide
gctaacagcagtcattgaatcctgtacgctccaaa

SEQ ID NO: 719 - DNA, 35 bp, Artificial Sequence
  Synthetic oligonucleotide
atcgcctgcgccaggactggggtgcagatcatgcg

SEQ ID NO: 720 - DNA, 37 bp, Artificial Sequence
  Synthetic oligonucleotide
ctgagcagtcaccattctttatctctactgtgctcga

SEQ ID NO: 721 - DNA, 35 bp, Artificial Sequence
  Synthetic oligonucleotide
acccacatcctgcgtgctaaggacggtggggccgg

SEQ ID NO: 722 - DNA, 36 bp, Artificial Sequence
  Synthetic oligonucleotide
ccggacctaggaatcgactcaggcgtggtagaacaa

SEQ ID NO: 723 - DNA, 35 bp, Artificial Sequence
  Synthetic oligonucleotide
tcatggccactaaactcgccccataaaaccttgtc

SEQ ID NO: 724 - DNA, 35 bp, Artificial Sequence
  Synthetic oligonucleotide
gactctactgtgcccgtttgttgttcttcccgaac

SEQ ID NO: 725 - DNA, 36 bp, Artificial Sequence
  Synthetic oligonucleotide
ggagccgggcctgccacgtagctcggaaaatgcgga

SEQ ID NO: 726 - DNA, 37 bp, Artificial Sequence
  Synthetic oligonucleotide
gatttcactagctctctactgtgcccatttctgttga

SEQ ID NO: 727 - DNA, 35 bp, Artificial Sequence
  Synthetic oligonucleotide
agcggatctagccagtatgcactcatgtcactttt

SEQ ID NO: 728 - DNA, 35 bp, Artificial Sequence
  Synthetic oligonucleotide
actgcacgtgcgcgcttaagttttcgcttctcttt

SEQ ID NO: 729 - DNA, 38 bp, Artificial Sequence
  Synthetic oligonucleotide
gtcgaggggaactcctctgaggctcaacacatatctga

SEQ ID NO: 730 - DNA, 35 bp, Artificial Sequence
  Synthetic oligonucleotide
gcgatccggttaaactacacactctactgtgcgaa

SEQ ID NO: 731 - DNA, 35 bp, Artificial Sequence
  Synthetic oligonucleotide
gctaaccaaggaatgcgctgccttagacagaattg

SEQ ID NO: 732 - DNA, 35 bp, Artificial Sequence
  Synthetic oligonucleotide
tcacctaccagggcgtggtaggtttttctctctac

SEQ ID NO: 733 - DNA, 37 bp, Artificial Sequence
  Synthetic oligonucleotide
cctcgcgtgccagggacctagtgcaatctatccgaga

SEQ ID NO: 734 - DNA, 38 bp, Artificial Sequence
  Synthetic oligonucleotide
ccgagcgaacgtacggaaagtgcgtactttatctttga

SEQ ID NO: 735 - DNA, 36 bp, Artificial Sequence
  Synthetic oligonucleotide
agtacgtgaccactactttccctcctttgtacttga

SEQ ID NO: 736 - DNA, 38 bp, Artificial Sequence
  Synthetic oligonucleotide
tcatgcggttgattggtctactcatgtttcttaattga

SEQ ID NO: 737 - DNA, 36 bp, Artificial Sequence
  Synthetic oligonucleotide
gcacaatcccacgcttcctattataccacgattcta

SEQ ID NO: 738 - DNA, 35 bp, Artificial Sequence
  Synthetic oligonucleotide
acaacccggcgcgccacggggtgatcgacaactgt

SEQ ID NO: 739 - DNA, 35 bp, Artificial Sequence
  Synthetic oligonucleotide
gatcgtccgcgtgcctggcaacgatacccgacaag

SEQ ID NO: 740 - DNA, 35 bp, Artificial Sequence
  Synthetic oligonucleotide
gcgtgtctctctactgtgcgcctcattcttatata

SEQ ID NO: 741 - DNA, 35 bp, Artificial Sequence
  Synthetic oligonucleotide
tcgtagtacacgcagtcgacaaacaagctagtatt

SEQ ID NO: 742 - DNA, 36 bp, Artificial Sequence
  Synthetic oligonucleotide
ttacctaccaacgtaatgcgctacaaccagagagta

SEQ ID NO: 743 - DNA, 35 bp, Artificial Sequence
  Synthetic oligonucleotide
ttagcgaaactagcgtacgacaaggtccaatgtaa

SEQ ID NO: 744 - DNA, 36 bp, Artificial Sequence
  Synthetic oligonucleotide
tgggcggatctagcaaaaacggacgcctcctgcgaa

SEQ ID NO: 745 - DNA, 35 bp, Artificial Sequence
  Synthetic oligonucleotide
aagcacgggacgcatgtcgtggctacctgaattct

SEQ ID NO: 746 - DNA, 38 bp, Artificial Sequence
  Synthetic oligonucleotide
gtgtgcaggcatgacgataagctttctaactcctatga

SEQ ID NO: 747 - DNA, 35 bp, Artificial Sequence
  Synthetic oligonucleotide
tctgcgcgcctagaagtacgcaatcaccacgcgac

SEQ ID NO: 748 - DNA, 38 bp, Artificial Sequence
  Synthetic oligonucleotide
atgtcgctgcaggtgcgtgcaagctttaatctccttga

SEQ ID NO: 749 - DNA, 37 bp, Artificial Sequence
  Synthetic oligonucleotide
tccgggcctaggaacggtcactagggaatgcccctga

SEQ ID NO: 750 - DNA, 36 bp, Artificial Sequence
  Synthetic oligonucleotide
acgtagtgcacatcctagactccactgtgcctctta

SEQ ID NO: 751 - DNA, 35 bp, Artificial Sequence
  Synthetic oligonucleotide
tcatgcataggcttatatgacaccatcgcttcttt

SEQ ID NO: 752 - DNA, 36 bp, Artificial Sequence
  Synthetic oligonucleotide
actgccggctgcaagcttttaggtacacttgattca

SEQ ID NO: 753 - DNA, 38 bp, Artificial Sequence
  Synthetic oligonucleotide
cacgcgccgctttttcgcctatacgctttttattttga

SEQ ID NO: 754 - DNA, 37 bp, Artificial Sequence
  Synthetic oligonucleotide
tctgactgcacgcatgggaccgcttaccactaaccga

SEQ ID NO: 755 - DNA, 36 bp, Artificial Sequence
  Synthetic oligonucleotide
tgcgggactagcataagttccacatgcgaagacaaa

SEQ ID NO: 756 - DNA, 35 bp, Artificial Sequence
  Synthetic oligonucleotide
gcgtgcctacgtacaggcggatatgcgcgtttccc

SEQ ID NO: 757 - DNA, 38 bp, Artificial Sequence
  Synthetic oligonucleotide
gcagtcgcgtatcgattcgctttcttatctggttatga

SEQ ID NO: 758 - DNA, 38 bp, Artificial Sequence
  Synthetic oligonucleotide
cgcaggcatgcaggcttttagtttaattactcctttga

SEQ ID NO: 759 - DNA, 36 bp, Artificial Sequence
  Synthetic oligonucleotide
gacactccagcactaaagctagtgtggtatcactta

SEQ ID NO: 760 - DNA, 38 bp, Artificial Sequence
  Synthetic oligonucleotide
cactgcgcttctagtactacctccactgtgctttttga

SEQ ID NO: 761 - DNA, 35 bp, Artificial Sequence
  Synthetic oligonucleotide
acacatgccgcttaatattgattcgcttttatcat

SEQ ID NO: 762 - DNA, 35 bp, Artificial Sequence
  Synthetic oligonucleotide
gagtagccaaacgcgtgcttggtggcgatcacgta

SEQ ID NO: 763 - DNA, 35 bp, Artificial Sequence
  Synthetic oligonucleotide
tactaaggaaagcggtaaaacgtacactgaaatct

SEQ ID NO: 764 - DNA, 35 bp, Artificial Sequence
  Synthetic oligonucleotide
ggtggtgcgaaaaatgcggtgtgaactcccctgaa

SEQ ID NO: 765 - DNA, 35 bp, Artificial Sequence
  Synthetic oligonucleotide
tatcgcgagccaggagacgtaaaaaggaaatgcgg

SEQ ID NO: 766 - DNA, 35 bp, Artificial Sequence
  Synthetic oligonucleotide
ggccaccgaccactatgcatcgtgtcatgacgtaa

SEQ ID NO: 767 - DNA, 36 bp, Artificial Sequence
  Synthetic oligonucleotide
atccgatctctaccgtgcaacccacccctttgttta

SEQ ID NO: 768 - DNA, 37 bp, Artificial Sequence
  Synthetic oligonucleotide
gcggtcgatcctctcaactgtgcactttttactacga

SEQ ID NO: 769 - DNA, 37 bp, Artificial Sequence
  Synthetic oligonucleotide
attcgtagctcaactctactgtgcattttttgtttga

SEQ ID NO: 770 - DNA, 37 bp, Artificial Sequence
  Synthetic oligonucleotide
gccgctaaactgtctccactgtgctaccttatcttga

SEQ ID NO: 771 - DNA, 35 bp, Artificial Sequence
  Synthetic oligonucleotide
cgcgtgcttgcgtactgtccgcgtaatcacacaca

SEQ ID NO: 772 - DNA, 36 bp, Artificial Sequence
  Synthetic oligonucleotide
tctccactgtgccgtttcctccgttcttactcctaa

SEQ ID NO: 773 - DNA, 35 bp, Artificial Sequence
  Synthetic oligonucleotide
acctgcgtgctaaggaacgtagcattcgtgtgcga

SEQ ID NO: 774 - DNA, 35 bp, Artificial Sequence
  Synthetic oligonucleotide
acacgcgcgcttgggactgaactcagcaatgcacc

SEQ ID NO: 775 - DNA, 35 bp, Artificial Sequence
  Synthetic oligonucleotide
tcacctactaacgtgtgcggggtttttacatcact

SEQ ID NO: 776 - DNA, 36 bp, Artificial Sequence
  Synthetic oligonucleotide
gatagccgcttagccaacacaaccgcttttgattca

SEQ ID NO: 777 - DNA, 35 bp, Artificial Sequence
  Synthetic oligonucleotide
gcggccttgcatcgattcaactcgccctatttcaa

SEQ ID NO: 778 - DNA, 35 bp, Artificial Sequence
  Synthetic oligonucleotide
agcgcatcgtagccgtacagcaatgtaatattctc

SEQ ID NO: 779 - DNA, 35 bp, Artificial Sequence
  Synthetic oligonucleotide
gctaactgcaggccaccacgcttgccctggctacc

SEQ ID NO: 780 - DNA, 35 bp, Artificial Sequence
  Synthetic oligonucleotide
aagcactgtgccgcagatatgcgatttttgtgatt

SEQ ID NO: 781 - DNA, 38 bp, Artificial Sequence
  Synthetic oligonucleotide
tgagccgcgcgcctggccacgacgattcatgtgattga

SEQ ID NO: 782 - DNA, 37 bp, Artificial Sequence
  Synthetic oligonucleotide
catgcgtaagcttatgtttcgattacgttcccattga

SEQ ID NO: 783 - DNA, 35 bp, Artificial Sequence
  Synthetic oligonucleotide
gtggtccgcgcgaaccaccatgggtgcaggcgaat

SEQ ID NO: 784 - DNA, 35 bp, Artificial Sequence
  Synthetic oligonucleotide
tcacctaccagggaaatgtccagccaccccgagct

SEQ ID NO: 785 - DNA, 35 bp, Artificial Sequence
  Synthetic oligonucleotide
gcagggcttgcaggcttttaattgtttcactatcg

SEQ ID NO: 786 - DNA, 36 bp, Artificial Sequence
  Synthetic oligonucleotide
gctaagtgcggtcactgccccaggagcttgatgcta

SEQ ID NO: 787 - DNA, 35 bp, Artificial Sequence
  Synthetic oligonucleotide
gtgcgggactagcacgcagtacagctttctgcgtc

SEQ ID NO: 788 - DNA, 35 bp, Artificial Sequence
  Synthetic oligonucleotide
gcgggactagcgagtttagcctgatactacattga

SEQ ID NO: 789 - DNA, 37 bp, Artificial Sequence
  Synthetic oligonucleotide
gcggacgattcctgttcctttgcttatttctctgaga

SEQ ID NO: 790 - DNA, 35 bp, Artificial Sequence
  Synthetic oligonucleotide
acacggacctagggtcgtactgcaggaagttgttc

SEQ ID NO: 791 - DNA, 37 bp, Artificial Sequence
  Synthetic oligonucleotide
actccactgtgcctctttaacttctttccatatatga

SEQ ID NO: 792 - DNA, 35 bp, Artificial Sequence
  Synthetic oligonucleotide
gcgtgcctacgacgccaggcactagtttagtaaac

SEQ ID NO: 793 - DNA, 38 bp, Artificial Sequence
  Synthetic oligonucleotide
aagcggggagcaacgtactgccatttactattccatga

SEQ ID NO: 794 - DNA, 35 bp, Artificial Sequence
  Synthetic oligonucleotide
tttaacggaacgacctgtggctgcacgtttctcca

SEQ ID NO: 795 - DNA, 35 bp, Artificial Sequence
  Synthetic oligonucleotide
tttgtactgagcaagcgtacataccgaagccccgt

SEQ ID NO: 796 - DNA, 35 bp, Artificial Sequence
  Synthetic oligonucleotide
catgcgcgattagcttgttctaccaccgctttaca

SEQ ID NO: 797 - DNA, 38 bp, Artificial Sequence
  Synthetic oligonucleotide
catgtcgacctctttgtaaactcgccctattttcctga

SEQ ID NO: 798 - DNA, 35 bp, Artificial Sequence
  Synthetic oligonucleotide
cattgcgcgctttcaataacctccgcttataacac

SEQ ID NO: 799 - DNA, 35 bp, Artificial Sequence
  Synthetic oligonucleotide
catctagaggctcattcatattaacacgctttcct

SEQ ID NO: 800 - DNA, 37 bp, Artificial Sequence
  Synthetic oligonucleotide
tcgtagtgctgcaagtccttagtaccttggatcttga

SEQ ID NO: 801 - DNA, 35 bp, Artificial Sequence
  Synthetic oligonucleotide
atgcacggttctgctcaggccatcattttcttcac

SEQ ID NO: 802 - DNA, 35 bp, Artificial Sequence
  Synthetic oligonucleotide
gcgcgcctacgttaatgcacttcgtgacatcttcc

SEQ ID NO: 803 - DNA, 35 bp, Artificial Sequence
  Synthetic oligonucleotide
ccggtcgtagggtgactgcgggcataagctgggtt

SEQ ID NO: 804 - DNA, 35 bp, Artificial Sequence
  Synthetic oligonucleotide
tgcgcaggcccgttgtactcgctcactgctagatt

SEQ ID NO: 805 - DNA, 36 bp, Artificial Sequence
  Synthetic oligonucleotide
aagcacggacaagcatgtatgcgatcacgcccttta

SEQ ID NO: 806 - DNA, 35 bp, Artificial Sequence
  Synthetic oligonucleotide
gactgcgggactagcaacgtactgtggctggcgat

SEQ ID NO: 807 - DNA, 35 bp, Artificial Sequence
  Synthetic oligonucleotide
gcctccgtaacctacccgcgtgcctgggggttacc

SEQ ID NO: 808 - DNA, 35 bp, Artificial Sequence
  Synthetic oligonucleotide
gcagggaatccagcgaccgttcctctaccgtgcct

SEQ ID NO: 809 - DNA, 38 bp, Artificial Sequence
  Synthetic oligonucleotide
catgcggaagctttctctgttgatgatgaaccctttga

SEQ ID NO: 810 - DNA, 35 bp, Artificial Sequence
  Synthetic oligonucleotide
actgcgctaatgcccgcttaacctccatgattgtt

SEQ ID NO: 811 - DNA, 35 bp, Artificial Sequence
  Synthetic oligonucleotide
ggggtcgcgtgccagaccacgactcatgtctgtgc

SEQ ID NO: 812 - DNA, 35 bp, Artificial Sequence
  Synthetic oligonucleotide
atcgtagaactgcagacccgcatggctacctttgt

SEQ ID NO: 813 - DNA, 36 bp, Artificial Sequence
  Synthetic oligonucleotide
attgcggatcgtagctctaactgcgcatgcggtaca

SEQ ID NO: 814 - DNA, 35 bp, Artificial Sequence
  Synthetic oligonucleotide
tacacaccgctttactatcctcaatttcgctttcc

SEQ ID NO: 815 - DNA, 35 bp, Artificial Sequence
  Synthetic oligonucleotide
tgcctctactgtgccgataccggtttctttatatt

SEQ ID NO: 816 - DNA, 36 bp, Artificial Sequence
  Synthetic oligonucleotide
tcccgcgcgctagggtaatgatccagcagacatgta

SEQ ID NO: 817 - DNA, 36 bp, Artificial Sequence
  Synthetic oligonucleotide
tcgtagtactcgcgcttcccgtatcacaattttgaa

SEQ ID NO: 818 - DNA, 37 bp, Artificial Sequence
  Synthetic oligonucleotide
aggtcgcgcgccagggacgtgctgcagaaccacctga

SEQ ID NO: 819 - DNA, 36 bp, Artificial Sequence
  Synthetic oligonucleotide
tctaccgcgcgcttggaggaacgttccggactggca

SEQ ID NO: 820 - DNA, 35 bp, Artificial Sequence
  Synthetic oligonucleotide
gcaaaataataccgctacattctctacaactcgcc

SEQ ID NO: 821 - DNA, 36 bp, Artificial Sequence
  Synthetic oligonucleotide
gcgtggggtgcgcgctaaccacacttgaccagacta

SEQ ID NO: 822 - DNA, 35 bp, Artificial Sequence
  Synthetic oligonucleotide
cccggcgagccacgggctgtacgagcaagtcacac

SEQ ID NO: 823 - DNA, 36 bp, Artificial Sequence
  Synthetic oligonucleotide
gcgaggaccatcccgcgtgcctgggagtcactttaa

SEQ ID NO: 824 - DNA, 38 bp, Artificial Sequence
  Synthetic oligonucleotide
atgcacggatgcggctagcgatctcccctaaacactga

SEQ ID NO: 825 - DNA, 37 bp, Artificial Sequence
  Synthetic oligonucleotide
atgcactgtacgtagagtaatgcggttcattccttga

SEQ ID NO: 826 - DNA, 35 bp, Artificial Sequence
  Synthetic oligonucleotide
gatcgtaacgctgcaaggtcactccgggaaaacca

SEQ ID NO: 827 - DNA, 38 bp, Artificial Sequence
  Synthetic oligonucleotide
cctgcgcgctaggggagatactggttcgtgcgatttga

SEQ ID NO: 828 - DNA, 35 bp, Artificial Sequence
  Synthetic oligonucleotide
acgcgtgctaggacggactgaacggtaaaactaag

SEQ ID NO: 829 - DNA, 38 bp, Artificial Sequence
  Synthetic oligonucleotide
actgcagagtatgcaagcttgaccaccatacgctttga

SEQ ID NO: 830 - DNA, 37 bp, Artificial Sequence
  Synthetic oligonucleotide
catgcgcaggctttctctttagttctcttctggttga

SEQ ID NO: 831 - DNA, 35 bp, Artificial Sequence
  Synthetic oligonucleotide
tcaagcgaatctagcggtacacctcgcaggctcgc

SEQ ID NO: 832 - DNA, 35 bp, Artificial Sequence
  Synthetic oligonucleotide
catgcaagcttcgttcaacatccaacctagctgta

SEQ ID NO: 833 - DNA, 35 bp, Artificial Sequence
  Synthetic oligonucleotide
gcgtgccaacgttgcatcaactattttcatgaatt

SEQ ID NO: 834 - DNA, 38 bp, Artificial Sequence
  Synthetic oligonucleotide
gcgtgctgtgactccaccgtgccttatactttgaatga

SEQ ID NO: 835 - DNA, 36 bp, Artificial Sequence
  Synthetic oligonucleotide
catgcgcaagcttcaacgacacaactaaacctgcta

SEQ ID NO: 836 - DNA, 36 bp, Artificial Sequence
  Synthetic oligonucleotide
ggctgaccacgatgaagtttgcgcaagcttttatta

SEQ ID NO: 837 - DNA, 37 bp, Artificial Sequence
  Synthetic oligonucleotide
aacgcgagcctgtacggtactgcccctatcccaccga

SEQ ID NO: 838 - DNA, 35 bp, Artificial Sequence
  Synthetic oligonucleotide
gcgggcctacgactgcaggacccctgacccattct

SEQ ID NO: 839 - DNA, 36 bp, Artificial Sequence
  Synthetic oligonucleotide
gctaactgcgtgtcatttcggtttcctacatccata

SEQ ID NO: 840 - DNA, 36 bp, Artificial Sequence
  Synthetic oligonucleotide
ccggatctaggagagtactggctgcacatgcgacaa

SEQ ID NO: 841 - DNA, 36 bp, Artificial Sequence
  Synthetic oligonucleotide
tacgcgcgactaacattaatgcggtcttatcatcca

SEQ ID NO: 842 - DNA, 38 bp, Artificial Sequence
  Synthetic oligonucleotide
cgccgcgccagggtactgcaggaagcgctacgacttga

SEQ ID NO: 843 - DNA, 35 bp, Artificial Sequence
  Synthetic oligonucleotide
gcagtcagcaacgcttctttatgtcatacccgctt

SEQ ID NO: 844 - DNA, 35 bp, Artificial Sequence
  Synthetic oligonucleotide
catgcgaaagcttctcatacttgatcacgtttccc

SEQ ID NO: 845 - DNA, 36 bp, Artificial Sequence
  Synthetic oligonucleotide
cacgcggttcgtagcggaatgtactggtcaatccta

SEQ ID NO: 846 - DNA, 36 bp, Artificial Sequence
  Synthetic oligonucleotide
ccggggctaggaacgggggcagtcagagcgaccata

SEQ ID NO: 847 - DNA, 35 bp, Artificial Sequence
  Synthetic oligonucleotide
ccggcagtcttatctctactgtgccttctttaatc

SEQ ID NO: 848 - DNA, 38 bp, Artificial Sequence
  Synthetic oligonucleotide
gagttgcgagcatgcggacgcttttgttttgcttttga

SEQ ID NO: 849 - DNA, 38 bp, Artificial Sequence
  Synthetic oligonucleotide
tacgcaggagggccatgacgctgactatacgcttttga

SEQ ID NO: 850 - DNA, 38 bp, Artificial Sequence
  Synthetic oligonucleotide
ttctgcgcaatttcaaccctctactgtgcccaatttga

SEQ ID NO: 851 - DNA, 35 bp, Artificial Sequence
  Synthetic oligonucleotide
tcataccctcatgatcatgcagtcaccactcttag

SEQ ID NO: 852 - DNA, 38 bp, Artificial Sequence
  Synthetic oligonucleotide
gcggagctagcacggtactgcgcataaactatgattga

SEQ ID NO: 853 - DNA, 35 bp, Artificial Sequence
  Synthetic oligonucleotide
gaccggaactaggtacggctgcagagcgcaaccgc

SEQ ID NO: 854 - DNA, 38 bp, Artificial Sequence
  Synthetic oligonucleotide
tcgtagtcaccgcgggtcatccactattaacaccttga

SEQ ID NO: 855 - DNA, 35 bp, Artificial Sequence
  Synthetic oligonucleotide
acgcgacagctacgagtccccgcggagtgcaacgc

SEQ ID NO: 856 - DNA, 36 bp, Artificial Sequence
  Synthetic oligonucleotide
tcacctactagggaaggccacacggcacgcacatta

SEQ ID NO: 857 - DNA, 37 bp, Artificial Sequence
  Synthetic oligonucleotide
aaccggaactaggtgtgggacctgaaggcatggacga

SEQ ID NO: 858 - DNA, 37 bp, Artificial Sequence
  Synthetic oligonucleotide
gtaaactgcgctcttcttcgccctcccctgtctcgga

SEQ ID NO: 859 - DNA, 35 bp, Artificial Sequence
  Synthetic oligonucleotide
tcccatcgccggacgctccatatctttcggatcct

SEQ ID NO: 860 - DNA, 36 bp, Artificial Sequence
  Synthetic oligonucleotide
tgcctctaccgtgccgtgttgattttctccattcta

SEQ ID NO: 861 - DNA, 38 bp, Artificial Sequence
  Synthetic oligonucleotide
gcgggccgtgactgtttaccactctactgtgcgattga

SEQ ID NO: 862 - DNA, 35 bp, Artificial Sequence
  Synthetic oligonucleotide
gcgatccatgacgaccaatatataccgctttgaca

SEQ ID NO: 863 - DNA, 36 bp, Artificial Sequence
  Synthetic oligonucleotide
tgtactctctactgtgcccttcctgagtgtttatca

SEQ ID NO: 864 - DNA, 36 bp, Artificial Sequence
  Synthetic oligonucleotide
taaggcgaaactagctgaaggtactgcgaattttta

SEQ ID NO: 865 - DNA, 37 bp, Artificial Sequence
  Synthetic oligonucleotide
atgcacggtacggaaggattctgccttcccatcacga

SEQ ID NO: 866 - DNA, 36 bp, Artificial Sequence
  Synthetic oligonucleotide
ggtcgcgtgccaggcacggagatgcggtcctttgca

SEQ ID NO: 867 - DNA, 35 bp, Artificial Sequence
  Synthetic oligonucleotide
aacctgaaggaaccgcatctctaccgtgcctatat

SEQ ID NO: 868 - DNA, 35 bp, Artificial Sequence
  Synthetic oligonucleotide
catgcaggctttccaacccactttaatagctaact

SEQ ID NO: 869 - DNA, 36 bp, Artificial Sequence
  Synthetic oligonucleotide
tcatgccaggctttttctttgaattccgatttaata

SEQ ID NO: 870 - DNA, 36 bp, Artificial Sequence
  Synthetic oligonucleotide
gcgttagatctctaccgtgctcaacctcttctgtaa

SEQ ID NO: 871 - DNA, 36 bp, Artificial Sequence
  Synthetic oligonucleotide
gtgacgccgctatctttacaactctactgtgcttta

SEQ ID NO: 872 - DNA, 36 bp, Artificial Sequence
  Synthetic oligonucleotide
tattgcgaactcctctgagctacggtacgtgtggca

SEQ ID NO: 873 - DNA, 35 bp, Artificial Sequence
  Synthetic oligonucleotide
tctatcaactcgccccaaattacccgccccacata

SEQ ID NO: 874 - DNA, 35 bp, Artificial Sequence
  Synthetic oligonucleotide
catgtctaggtctttcgtaatcctctaccgtgcca

SEQ ID NO: 875 - DNA, 36 bp, Artificial Sequence
  Synthetic oligonucleotide
ctgcggtcagtgcccatccgctcccaactagcctta

SEQ ID NO: 876 - DNA, 38 bp, Artificial Sequence
  Synthetic oligonucleotide
ccactccaccgtgcccttctataggttttctcaactga

SEQ ID NO: 877 - DNA, 35 bp, Artificial Sequence
  Synthetic oligonucleotide
gccttcccacgtcgagtcagttcgacgtccccgtt

SEQ ID NO: 878 - DNA, 38 bp, Artificial Sequence
  Synthetic oligonucleotide
tcatccttttactcgaccgtgccccccttagttcctga

SEQ ID NO: 879 - DNA, 36 bp, Artificial Sequence
  Synthetic oligonucleotide
taaaggccacgcatcccccgttaaaacatcattaaa

SEQ ID NO: 880 - DNA, 36 bp, Artificial Sequence
  Synthetic oligonucleotide
ttcttctccactgtgccccaactcaatttttgatta

SEQ ID NO: 881 - DNA, 36 bp, Artificial Sequence
  Synthetic oligonucleotide
tctccaccgtgccatcgaaaatttactctctgctca

SEQ ID NO: 882 - DNA, 38 bp, Artificial Sequence
  Synthetic oligonucleotide
taacctactaaggcatgtcgactctatcatatgcttga

SEQ ID NO: 883 - DNA, 36 bp, Artificial Sequence
  Synthetic oligonucleotide
aaaggcatgacatatatcctctaccgtgcccgccta

SEQ ID NO: 884 - DNA, 36 bp, Artificial Sequence
  Synthetic oligonucleotide
catgccagatttcgcactagttacctccttagctta

SEQ ID NO: 885 - DNA, 38 bp, Artificial Sequence
  Synthetic oligonucleotide
catgccggagcgatttattcaatatcttctatgagtga

SEQ ID NO: 886 - DNA, 35 bp, Artificial Sequence
  Synthetic oligonucleotide
atcgtagtacaaaagggggttatctcttggtttcg

SEQ ID NO: 887 - DNA, 35 bp, Artificial Sequence
  Synthetic oligonucleotide
tagacatatcgttctggactttttctccactgtgc

SEQ ID NO: 888 - DNA, 37 bp, Artificial Sequence
  Synthetic oligonucleotide
atcgtagtactgtggtccgccactacccgaactatga

SEQ ID NO: 889 - DNA, 37 bp, Artificial Sequence
  Synthetic oligonucleotide
gaagagccccgcctgcttccttatccagatcatgcga

SEQ ID NO: 890 - DNA, 35 bp, Artificial Sequence
  Synthetic oligonucleotide
gcgcgatacgacatctccttagcttttgttttgct

SEQ ID NO: 891 - DNA, 35 bp, Artificial Sequence
  Synthetic oligonucleotide
gacgtcatggccaccctagcttcatttcttgcttt

SEQ ID NO: 892 - DNA, 38 bp, Artificial Sequence
  Synthetic oligonucleotide
ccggtcgtaggactaccgccaggcatattattgtttga

SEQ ID NO: 893 - DNA, 36 bp, Artificial Sequence
  Synthetic oligonucleotide
tgtggtagtacgcagtcagtcgctgtatcccgctaa

SEQ ID NO: 894 - DNA, 38 bp, Artificial Sequence
  Synthetic oligonucleotide
tatgcgcccctggtctatattcggaaaaccctacctga

SEQ ID NO: 895 - DNA, 35 bp, Artificial Sequence
  Synthetic oligonucleotide
ttaggtatcatgcggccacctggtctaatattttt

SEQ ID NO: 896 - DNA, 35 bp, Artificial Sequence
  Synthetic oligonucleotide
tcgtagtactcagggccccaccaaatttcttaaat

SEQ ID NO: 897 - DNA, 35 bp, Artificial Sequence
  Synthetic oligonucleotide
accgcgcgcctggtatcctgctatgtctagtccct

SEQ ID NO: 898 - DNA, 35 bp, Artificial Sequence
  Synthetic oligonucleotide
gatcgtagcgtacgtaggaaatccccgaaacaacg

SEQ ID NO: 899 - DNA, 37 bp, Artificial Sequence
  Synthetic oligonucleotide
cgtgccatggctttaaccgtatcttcgctttttctga

SEQ ID NO: 900 - DNA, 36 bp, Artificial Sequence
  Synthetic oligonucleotide
gcgatcgtagcacggtaaactggcccccttgcaata

SEQ ID NO: 901 - DNA, 36 bp, Artificial Sequence
  Synthetic oligonucleotide
acgcactgtataaagtctacgcgcccttcaaccata

SEQ ID NO: 902 - DNA, 38 bp, Artificial Sequence
  Synthetic oligonucleotide
cttacgcgtgcttggaacgatgtattgcggccaattga

SEQ ID NO: 903 - DNA, 36 bp, Artificial Sequence
  Synthetic oligonucleotide
tcgtaggactgcaaaccacacgccttgttcgaaaaa

SEQ ID NO: 904 - DNA, 35 bp, Artificial Sequence
  Synthetic oligonucleotide
ccgggtctaggacggctctgttgtctcctccctgt

SEQ ID NO: 905 - DNA, 35 bp, Artificial Sequence
  Synthetic oligonucleotide
atcgtagcactgcagggcgcctagtttacaatggg

SEQ ID NO: 906 - DNA, 35 bp, Artificial Sequence
  Synthetic oligonucleotide
gacgtcatcgtgccttcttggctgaccgtacagga

SEQ ID NO: 907 - DNA, 38 bp, Artificial Sequence
  Synthetic oligonucleotide
ttcatccgcgcgaatgaaaccgatctacatccctatga

SEQ ID NO: 908 - DNA, 35 bp, Artificial Sequence
  Synthetic oligonucleotide
atcgtagtaccataccccgcatgccgccaaaattt

SEQ ID NO: 909 - DNA, 37 bp, Artificial Sequence
  Synthetic oligonucleotide
aaacccgcgagcaggcattgaactcccctgaatacga

SEQ ID NO: 910 - DNA, 37 bp, Artificial Sequence
  Synthetic oligonucleotide
gcaatgacgtgcgttcgaccgattatctctactatga

SEQ ID NO: 911 - DNA, 36 bp, Artificial Sequence
  Synthetic oligonucleotide
aagcactgtacggaagtaggcccgcccccaaattaa

SEQ ID NO: 912 - DNA, 35 bp, Artificial Sequence
  Synthetic oligonucleotide
tcgtagtatctggaggtcgtgcgttgcactattac

SEQ ID NO: 913 - DNA, 36 bp, Artificial Sequence
  Synthetic oligonucleotide
gatcgtatacgtacgctaggtctctttcgcttatca

SEQ ID NO: 914 - DNA, 36 bp, Artificial Sequence
  Synthetic oligonucleotide
tgggcaaccggaactagtacagcccacgtacgttga

SEQ ID NO: 915 - DNA, 36 bp, Artificial Sequence
  Synthetic oligonucleotide
tcgcaaactcagcttcctctctaccgtgcatgttaa

SEQ ID NO: 916 - DNA, 38 bp, Artificial Sequence
  Synthetic oligonucleotide
gcgcgctaacaccctgcggtacaccaggaactccttga

SEQ ID NO: 917 - DNA, 35 bp, Artificial Sequence
  Synthetic oligonucleotide
ccggtcactgctggagtgcgaaagctttctcttgt

SEQ ID NO: 918 - DNA, 36 bp, Artificial Sequence
  Synthetic oligonucleotide
gcagaaggaaatgcgcgctaattgacaacgctcgaa

SEQ ID NO: 919 - DNA, 38 bp, Artificial Sequence
  Synthetic oligonucleotide
accgcgcgcctgggaccgtaatggatcctacataatga

SEQ ID NO: 920 - DNA, 36 bp, Artificial Sequence
  Synthetic oligonucleotide
gcgatcgtagctaagggatctactagggaatgccca

SEQ ID NO: 921 - DNA, 35 bp, Artificial Sequence
  Synthetic oligonucleotide
ttacctaccagggatgcggccccgaagccattctt

SEQ ID NO: 922 - DNA, 38 bp, Artificial Sequence
  Synthetic oligonucleotide
taggcaactaatgcagagacgcgacccacgacatttga

SEQ ID NO: 923 - DNA, 35 bp, Artificial Sequence
  Synthetic oligonucleotide
ctcctagcaggcgggccctgacaggcggtcgtagc

SEQ ID NO: 924 - DNA, 35 bp, Artificial Sequence
  Synthetic oligonucleotide
tcacctaccacggtcatctttacttgagacaacaa

SEQ ID NO: 925 - DNA, 35 bp, Artificial Sequence
  Synthetic oligonucleotide
taagcaactcctgccgtgccattaaagcttttata

SEQ ID NO: 926 - DNA, 36 bp, Artificial Sequence
  Synthetic oligonucleotide
taccgctgccatgaatcatctctgttaaactagcca

SEQ ID NO: 927 - DNA, 37 bp, Artificial Sequence
  Synthetic oligonucleotide
gagtacgcgacgccttggtctactactcttccctgga

SEQ ID NO: 928 - DNA, 35 bp, Artificial Sequence
  Synthetic oligonucleotide
gcggtcgtagcaacactgcatcctcatgatactta

SEQ ID NO: 929 - DNA, 35 bp, Artificial Sequence
  Synthetic oligonucleotide
tccgacggggcatcgtgtcaggcgcatgaaatttt

SEQ ID NO: 930 - DNA, 35 bp, Artificial Sequence
  Synthetic oligonucleotide
atcgtagtagtgccgcgctagcctgacgcaaaatt

SEQ ID NO: 931 - DNA, 38 bp, Artificial Sequence
  Synthetic oligonucleotide
aggcgtgcatgacgatttaattaaccaccgaaccatga

SEQ ID NO: 932 - DNA, 36 bp, Artificial Sequence
  Synthetic oligonucleotide
catcatacgaccgcgtgattggtgagttgtaacgga

SEQ ID NO: 933 - DNA, 35 bp, Artificial Sequence
  Synthetic oligonucleotide
catgcaagcttggattttctcacgtttcattgtta

SEQ ID NO: 934 - DNA, 35 bp, Artificial Sequence
  Synthetic oligonucleotide
gcgcataggctttttatatttattctctatgcttt

SEQ ID NO: 935 - DNA, 35 bp, Artificial Sequence
  Synthetic oligonucleotide
gcccgattccagaaaccacgcttttaccatttcct

SEQ ID NO: 936 - DNA, 37 bp, Artificial Sequence
  Synthetic oligonucleotide
gctagcattggcttttgtttatttgcttctatcttga

SEQ ID NO: 937 - DNA, 35 bp, Artificial Sequence
  Synthetic oligonucleotide
gcgctactagccgatatatttccgttccactcttt

SEQ ID NO: 938 - DNA, 36 bp, Artificial Sequence
  Synthetic oligonucleotide
gactaaatacctcactatctccactgtgccgttaaa

SEQ ID NO: 939 - DNA, 35 bp, Artificial Sequence
  Synthetic oligonucleotide
gcaaattctgttcgatccacactattaactcgctt

SEQ ID NO: 940 - DNA, 37 bp, Artificial Sequence
  Synthetic oligonucleotide
gaatcatccggccctaaactccactgtgccctcttga

SEQ ID NO: 941 - DNA, 35 bp, Artificial Sequence
  Synthetic oligonucleotide
tgctaggtgatgaattaatttggtctctttttggt

SEQ ID NO: 942 - DNA, 35 bp, Artificial Sequence
  Synthetic oligonucleotide
gcctacaggatttttgattgatcgatttcgcttct

SEQ ID NO: 943 - DNA, 36 bp, Artificial Sequence
  Synthetic oligonucleotide
catgcaattcttcgcttcctattccttaagcttgta

SEQ ID NO: 944 - DNA, 36 bp, Artificial Sequence
  Synthetic oligonucleotide
gctaactgcttggcgtgcgagctgaaccaacgctta

SEQ ID NO: 945 - DNA, 36 bp, Artificial Sequence
  Synthetic oligonucleotide
gccgaaaacatcgctgttcgtcttatcaactcgccc

SEQ ID NO: 946 - DNA, 36 bp, Artificial Sequence
  Synthetic oligonucleotide
atgcctgtccaaaaactctaccgtgccgtgttacta

SEQ ID NO: 947 - DNA, 37 bp, Artificial Sequence
  Synthetic oligonucleotide
catgcgtcgattcactatcttcgctttcaattgctga

SEQ ID NO: 948 - DNA, 35 bp, Artificial Sequence
  Synthetic oligonucleotide
gtcaaatgtcaatgggcaccacgcactgttcgcgc

SEQ ID NO: 949 - DNA, 36 bp, Artificial Sequence
  Synthetic oligonucleotide
gcgacacgattggtcaattcctcgctttcctctcta

SEQ ID NO: 950 - DNA, 36 bp, Artificial Sequence
  Synthetic oligonucleotide
catagggacggaacgggcacggtagctcctaacgta

SEQ ID NO: 951 - DNA, 36 bp, Artificial Sequence
  Synthetic oligonucleotide
taggcaactactaggtgatgcgtcaattacctctta

SEQ ID NO: 952 - DNA, 38 bp, Artificial Sequence
  Synthetic oligonucleotide
tcacctaccacaagatcgtgcccctgaatcacttgtga

SEQ ID NO: 953 - DNA, 36 bp, Artificial Sequence
  Synthetic oligonucleotide
agtcaggcatggtagacgcttctacttcgctttcta

SEQ ID NO: 954 - DNA, 37 bp, Artificial Sequence
  Synthetic oligonucleotide
taacctaccaagtacatgacctttcacttgatcttga

SEQ ID NO: 955 - DNA, 38 bp, Artificial Sequence
  Synthetic oligonucleotide
tatgccagcttctcatatatcccgctttctatcaatga

SEQ ID NO: 956 - DNA, 35 bp, Artificial Sequence
  Synthetic oligonucleotide
gaagccgcgcgccaagcaaagggtactgcccctct

SEQ ID NO: 957 - DNA, 36 bp, Artificial Sequence
  Synthetic oligonucleotide
atgcacggtgcggccggtcatgcaagacacttcgta

SEQ ID NO: 958 - DNA, 35 bp, Artificial Sequence
  Synthetic oligonucleotide
ttcatttatctccaccgtgcactccatggatctta

SEQ ID NO: 959 - DNA, 36 bp, Artificial Sequence
  Synthetic oligonucleotide
gcaggcttcgaatcctccactgtgctaatacatgaa

SEQ ID NO: 960 - DNA, 35 bp, Artificial Sequence
  Synthetic oligonucleotide
atgcactgttgtgatcggcctgagcaggcgcccaa

SEQ ID NO: 961 - DNA, 38 bp, Artificial Sequence
  Synthetic oligonucleotide
aacccctcgccgcgtgcctggcgacggagtagtaatga

SEQ ID NO: 962 - DNA, 37 bp, Artificial Sequence
  Synthetic oligonucleotide
actccaccgtgccctttaatctcatgtgccacactga

SEQ ID NO: 963 - DNA, 35 bp, Artificial Sequence
  Synthetic oligonucleotide
gcgattatattaatttctctaccgtgcgatcccaa

SEQ ID NO: 964 - DNA, 35 bp, Artificial Sequence
  Synthetic oligonucleotide
atgcatcagcgcgcttattaatcaatcgcttttgt

SEQ ID NO: 965 - DNA, 34 bp, Artificial Sequence
  Synthetic oligonucleotide
gcgtgccagcgtactcgcatctcacagaacccgt

SEQ ID NO: 966 - DNA, 35 bp, Artificial Sequence
  Synthetic oligonucleotide
caaccactattcgcgtgccagggtggggaaacgtt

SEQ ID NO: 967 - DNA, 36 bp, Artificial Sequence
  Synthetic oligonucleotide
tatgcaaccgggactgagagtcctagcgctttttta

SEQ ID NO: 968 - DNA, 36 bp, Artificial Sequence
  Synthetic oligonucleotide
gcccgctttgtcaccggaattaattaactcgcctca

SEQ ID NO: 969 - DNA, 35 bp, Artificial Sequence
  Synthetic oligonucleotide
tcacctactagattcgtgccagaatttcaaatttc

SEQ ID NO: 970 - DNA, 25 bp, Artificial Sequence
  Synthetic oligonucleotide
cgaaagccatgacctccgatcactc

SEQ ID NO: 971 - DNA, 35 bp, Artificial Sequence
  Synthetic oligonucleotide
cctcaagacctaagcgacagcgtgaccttgtttca

SEQ ID NO: 972 - DNA, 68 bp, Artificial Sequence
  Synthetic oligonucleotide
caagtttccaggtagtttgcgtgttttacgtaccctcaagacctaagcgacagcgtgaccttgtttca

SEQ ID NO: 973 - DNA, 66 bp, Artificial Sequence
  Synthetic oligonucleotide
cagggtaggtatcgtgagtgttttacgtactcatcctcttcttttcttggtgttgagaagatgctc

SEQ ID NO: 974 - DNA, 69 bp, Artificial Sequence
  Synthetic oligonucleotide
gaaagtacaggaaaatgcctgctgttttacgtaccacaattctgcgggttagcaggaaggttagggaac

SEQ ID NO: 975 - DNA, 63 bp, Artificial Sequence
  Synthetic oligonucleotide
gagacagagtagggccaatgcgataatgctgttgagattattgagcttcatcatgaccagaag

SEQ ID NO: 976 - DNA, 66 bp, Artificial Sequence
  Synthetic oligonucleotide
gagacagagaaaaagggatagttcgttcggtcaaagacgcctatcttccagtttgatcgggaaact

SEQ ID NO: 977 - DNA, 58 bp, Artificial Sequence
  Synthetic oligonucleotide
gacgcgtggtgggttttacgtaccgaacctaactcctcgctacattcctattgttttc

SEQ ID NO: 978 - DNA, 57 bp, Artificial Sequence
  Synthetic oligonucleotide
gcgcaggaccggttttacgtacccaatttggttttactcccctcgattatgcggagt

SEQ ID NO: 979 - DNA, 60 bp, Artificial Sequence
  Synthetic oligonucleotide
gagacagaaagtcgcatgggcagtactttcgggttatatctatcatttacttgacaccct

SEQ ID NO: 980 - DNA, 67 bp, Artificial Sequence
  Synthetic oligonucleotide
agtggagtttaattggccttcagttacgtactcaacagccactttttttccaaattttgcaagagcc

SEQ ID NO: 981 - DNA, 66 bp, Artificial Sequence
  Synthetic oligonucleotide
gaacgattcgtagggtatgcatgtacgtactcaccgtgtggacggcaactcagagataacgcatat

SEQ ID NO: 982 - DNA, 60 bp, Artificial Sequence
  Synthetic oligonucleotide
agtatcaacgccggcatgtacgtaccctggagtttatgtattgccaacgagtttgtcttt

SEQ ID NO: 983 - DNA, 60 bp, Artificial Sequence
  Synthetic oligonucleotide
taaagggcgtggcatgtctacgtaccagataaggttgttattgtggaggatgttactaca

SEQ ID NO: 984 - DNA, 66 bp, Artificial Sequence
  Synthetic oligonucleotide
gagacagaacattggcacagtagagataggtcttccttcctgtgttccagctacaaacttagaaac

SEQ ID NO: 985 - DNA, 63 bp, Artificial Sequence
  Synthetic oligonucleotide
taatggcagccttacgtacctacgtactcataaaattggttttgcctttcagcaattcaactt

SEQ ID NO: 986 - DNA, 55 bp, Artificial Sequence
  Synthetic oligonucleotide
cgggcgcactgactacgtacctggtcaagacttgcatgaggacccgcaaattcct

SEQ ID NO: 987 - DNA, 57 bp, Artificial Sequence
  Synthetic oligonucleotide
gagacaggaagggcaccgtagactttcgttgggacgcttgaagcgcaagtagaaaac

SEQ ID NO: 988 - DNA, 58 bp, Artificial Sequence
  Synthetic oligonucleotide
ccatcgcgactgcactacgtactccagcagacctgcaatatcaaagttataagcgcgt

SEQ ID NO: 989 - DNA, 63 bp, Artificial Sequence
  Synthetic oligonucleotide
gagacagtcaaggcacagtggagtaatgcctgccaatgcactcgatcttgtcatttttttgcg

SEQ ID NO: 990 - DNA, 67 bp, Artificial Sequence
  Synthetic oligonucleotide
ggtagagaatacaagggtctgcaactacgtaccaaactggagagagaagtgaagacgatttaaccca

SEQ ID NO: 991 - DNA, 57 bp, Artificial Sequence
  Synthetic oligonucleotide
cggttcgcatggccatacgtaccgattgctgcattccgctcaacgcttgaggaagta

SEQ ID NO: 992 - DNA, 60 bp, Artificial Sequence
  Synthetic oligonucleotide
gaaggggatgaccgcaatacgtactctgaggctgttaaagctgtagcaactcttccacga

SEQ ID NO: 993 - DNA, 58 bp, Artificial Sequence
  Synthetic oligonucleotide
ccagtgacctgcagtgacgtactctaggacgcaaatcacttgaagaagtgaaagcgag

SEQ ID NO: 994 - DNA, 69 bp, Artificial Sequence
  Synthetic oligonucleotide
tggagttcaacaatatcagttagcagtgacgtacccacgcgatgacgttcgtcaagagtcgcataatct

SEQ ID NO: 995 - DNA, 58 bp, Artificial Sequence
  Synthetic oligonucleotide
cctgccacagtacctgacgtactcatttggaatgatgtgtactgggaataagacgacg

SEQ ID NO: 996 - DNA, 58 bp, Artificial Sequence
  Synthetic oligonucleotide
ctggactgctgacctgacgtactcacaagaatccctgctagctgaaggagggtcaaac

SEQ ID NO: 997 - DNA, 66 bp, Artificial Sequence
  Synthetic oligonucleotide
gaaaaatgacagacagcggttactgacgtaccttgacgtagattgctatcaggttacgatgactgc

SEQ ID NO: 998 - DNA, 64 bp, Artificial Sequence
  Synthetic oligonucleotide
aggttcgacgactacagttactgacgtaccttacagatcgtgtgctcatgacttccacagacgt

SEQ ID NO: 999 - DNA, 61 bp, Artificial Sequence
  Synthetic oligonucleotide
cgcatgagcttccttactgacgtactcttggaggagttgatagtggtaaaacaacattagc

SEQ ID NO: 1000 - DNA, 65 bp, Artificial Sequence
  Synthetic oligonucleotide
gagacagtcaagtatttacaagtggcgcagcctacgtatatatccaagtggttatgtccgacggc

SEQ ID NO: 1001 - DNA, 75 bp, Artificial Sequence
  Synthetic oligonucleotide
gagacagtaaaataagagagaacgtactagcttcgcattacagcaagaaggagtatggaacttatagcaagagag

SEQ ID NO: 1002 - DNA, 66 bp, Artificial Sequence
  Synthetic oligonucleotide
ggaaagaatcgcgatgtttgtactgacgtaccacccctccaaacgcattcttattggcaaatggaa

SEQ ID NO: 1003 - DNA, 57 bp, Artificial Sequence
  Synthetic oligonucleotide
ggcgtttacgggcatgacgtaccccgaagcaatactgtcgtcactctgtatgtccgt

SEQ ID NO: 1004 - DNA, 57 bp, Artificial Sequence
  Synthetic oligonucleotide
gtcgaaaggcggcatgacgtacccgggaatcggcatttcgcattcttaggatctaaa

SEQ ID NO: 1005 - DNA, 70 bp, Artificial Sequence
  Synthetic oligonucleotide
gagacaggagtgaatgagtttgagtatggaatgacccgatcttcataacggacaaactgaacgggccatt

SEQ ID NO: 1006 - DNA, 64 bp, Artificial Sequence
  Synthetic oligonucleotide
gttaatggaagcttgtcgcatgacgtactcgctatgcagacgagctggcagaggagagaaatca

SEQ ID NO: 1007 - DNA, 63 bp, Artificial Sequence
  Synthetic oligonucleotide
atgataagggtagctcgcatgacgtactcattcgcaaccatgtgaagtaatgtgagcgtactt

SEQ ID NO: 1008 - DNA, 56 bp, Artificial Sequence
  Synthetic oligonucleotide
ggcgcaatcgcatgacgtactcaccagttagcgtggcgtataccatgttgttaaca

SEQ ID NO: 1009 - DNA, 67 bp, Artificial Sequence
  Synthetic oligonucleotide
gagacagtgataatttagggctacggagtacgcctgaatcaatagaacaatatcagttatggcggtg

SEQ ID NO: 1010 - DNA, 67 bp, Artificial Sequence
  Synthetic oligonucleotide
gagacagatgattagggtagtagagaacgcaccggttgttaatatgacaggccgctaaagacgttct

SEQ ID NO: 1011 - DNA, 68 bp, Artificial Sequence
  Synthetic oligonucleotide
gagacagtttgaatcatgagtttgtgaaagcgtccgtctcagatgagtgggttaatcaatcaagtatg

SEQ ID NO: 1012 - DNA, 64 bp, Artificial Sequence
  Synthetic oligonucleotide
gagagaataggacgtacgcatgacgtactctgacacattagtaacgtcggcaagcacttagtcg

SEQ ID NO: 1013 - DNA, 58 bp, Artificial Sequence
  Synthetic oligonucleotide
tgggtgtgcgtacatgacgtactcgtgaaccagattatgtatggacgcgcaatagata

SEQ ID NO: 1014 - DNA, 58 bp, Artificial Sequence
  Synthetic oligonucleotide
ggtttccgcattgcaggacgtaccatacgaaatttgagcaagcaattgaaggcttaga

SEQ ID NO: 1015 - DNA, 53 bp, Artificial Sequence
  Synthetic oligonucleotide
ccctggctcgcgacgtacctatcagctaatagggtcggctcaacagtgtatcc

SEQ ID NO: 1016 - DNA, 62 bp, Artificial Sequence
  Synthetic oligonucleotide
cagtagagaacaagtcgcacgacgtacctatcaattcgtgaccccgatcatccagtccagaa

SEQ ID NO: 1017 - DNA, 61 bp, Artificial Sequence
  Synthetic oligonucleotide
gagacaggcaaagatgaaagcgcatgcttgagctctaggcccaaaacgaccttaatggtca

SEQ ID NO: 1018 - DNA, 52 bp, Artificial Sequence
  Synthetic oligonucleotide
tgcccgccctcacgtacctagcccagatcctacgagatgagctacgtaacta

SEQ ID NO: 1019 - DNA, 55 bp, Artificial Sequence
  Synthetic oligonucleotide
gttggaccgccctcacgtaccaaatgcactctatatggagggagagtagctggat

SEQ ID NO: 1020 - DNA, 57 bp, Artificial Sequence
  Synthetic oligonucleotide
actcctgtacgccctcacgtaccctggtctaggtatctaattcgtgggtcgggtact

SEQ ID NO: 1021 - DNA, 63 bp, Artificial Sequence
  Synthetic oligonucleotide
gccattaacttcagtagccctcacgtaccattagctcggatgctatcagcttgcgcctattat

SEQ ID NO: 1022 - DNA, 65 bp, Artificial Sequence
  Synthetic oligonucleotide
gagacaggataaaggtaagaaaagcggctgcacgatctgtattttgcacctttcgctatgctgag

SEQ ID NO: 1023 - DNA, 64 bp, Artificial Sequence
  Synthetic oligonucleotide
gagacagtcaggaaggaaaatgtacgcacctgtgtccgtctatacgcatactggtccacatata

SEQ ID NO: 1024 - DNA, 62 bp, Artificial Sequence
  Synthetic oligonucleotide
gagacagagggacaaggaggaaattggcatgttggagttaacggagacccgccatcgtttac

SEQ ID NO: 1025 - DNA, 53 bp, Artificial Sequence
  Synthetic oligonucleotide
ggacggcccctcacgtaccgctcattttgaacatacgattgcgattacggaaa

SEQ ID NO: 1026 - DNA, 55 bp, Artificial Sequence
  Synthetic oligonucleotide
atgaccgcccctcacgtactcctatgcatcatgtgcctcactaggacatcatgct

SEQ ID NO: 1027 - DNA, 66 bp, Artificial Sequence
  Synthetic oligonucleotide
cacagtagaggaatatgcgctatcacgtactcctaaattgggaaaaaaggttttagctattgatgg

SEQ ID NO: 1028 - DNA, 59 bp, Artificial Sequence
  Synthetic oligonucleotide
gagacagtcattgggcacggtagacttcagttaaaggctatcttgctccgctcgttctc

SEQ ID NO: 1029 - DNA, 61 bp, Artificial Sequence
  Synthetic oligonucleotide
gcacggtagagagtagttgcacgtaccttaaagctatccacgaatgtcaaaaatgtggttt

SEQ ID NO: 1030 - DNA, 73 bp, Artificial Sequence
  Synthetic oligonucleotide
gagacagtatgagataagcacagtagagattgacatgtcccgaatgtataatgctgacgttcttgcttttggc

SEQ ID NO: 1031 - DNA, 58 bp, Artificial Sequence
  Synthetic oligonucleotide
gagacagtaggggcacggtagagcctattgaagcaatcctctccccaatacttaaaaa

SEQ ID NO: 1032 - DNA, 54 bp, Artificial Sequence
  Synthetic oligonucleotide
gggggtgtcctgcacgtacctacggttaccgtctttataagtgaacaaaaccgg

SEQ ID NO: 1033 - DNA, 63 bp, Artificial Sequence
  Synthetic oligonucleotide
gtagagtatccacgcaaactgcacgtacctctgtgaactgtcatcggtccgatcaattagtct

SEQ ID NO: 1034 - DNA, 63 bp, Artificial Sequence
  Synthetic oligonucleotide
gcacggtagagttcatgtatgcacgtacctcccctttcccaagtaaatgtacgggaattatcg

SEQ ID NO: 1035 - DNA, 67 bp, Artificial Sequence
  Synthetic oligonucleotide
gagacagggcacggtagagtaaaataatgtgacgctttattatgtgttcgtctaactctgtttctgt

SEQ ID NO: 1036 - DNA, 57 bp, Artificial Sequence
  Synthetic oligonucleotide
aaagtgcgcctgatgcacgtacccgagtgcatgagctgtctttcacatgatacatcg

SEQ ID NO: 1037 - DNA, 61 bp, Artificial Sequence
  Synthetic oligonucleotide
ctcgagaacgatactgtggcacgtacctatttctgttcacggatgaaggcctatatcaatg

SEQ ID NO: 1038 - DNA, 55 bp, Artificial Sequence
  Synthetic oligonucleotide
ccctctcgcatggcacgtacccatccactttcatggaaacaataagagcagggaa

SEQ ID NO: 1039 - DNA, 62 bp, Artificial Sequence
  Synthetic oligonucleotide
gagacagtcacgtcatttcagatggcacacaaactcactactaccaacaacctcaccaaaaa

SEQ ID NO: 1040 - DNA, 78 bp, Artificial Sequence
  Synthetic oligonucleotide
gagacagtcaaccttaatataagcacagtagagttacaagttcctcatgtcctctgttaatccagcctgaatatgcca

SEQ ID NO: 1041 - DNA, 62 bp, Artificial Sequence
  Synthetic oligonucleotide
gcacagtagagtattggtcgcacgtaccagaaatgtcactcccatggtggctgatatagaaa

SEQ ID NO: 1042 - DNA, 58 bp, Artificial Sequence
  Synthetic oligonucleotide
gagacagaggagtgagcacggttcatgtcgaaccttggataggagcgaccgattacgt

SEQ ID NO: 1043 - DNA, 62 bp, Artificial Sequence
  Synthetic oligonucleotide
ggttacatgggctttatcgcacgtactctcaggttgttacttgaagggttcaacacgagctc

SEQ ID NO: 1044 - DNA, 60 bp, Artificial Sequence
  Synthetic oligonucleotide
ggtagagacaacttgcgcacgtactcagaagatcaaaaaacgatccctgtccatcaatac

SEQ ID NO: 1045 - DNA, 65 bp, Artificial Sequence
  Synthetic oligonucleotide
gagacagaataaagcacggtggagacaatgcttaggctaccaaatgaatttaaagccagctgaaa

SEQ ID NO: 1046 - DNA, 65 bp, Artificial Sequence
  Synthetic oligonucleotide
gagacagtaggaaataggcacggtagagttccaatgcttgcagtatgtatcctgatcgtgcgtgc

SEQ ID NO: 1047 - DNA, 53 bp, Artificial Sequence
  Synthetic oligonucleotide
aggtcggtgcgcacgtaccctgcattctcatggaaatgcaatggattcattcc

SEQ ID NO: 1048 - DNA, 54 bp, Artificial Sequence
  Synthetic oligonucleotide
gtgtggtggcgcacgtactcctgttgcagtatcacgtaaatacctacttcgata

SEQ ID NO: 1049 - DNA, 67 bp, Artificial Sequence
  Synthetic oligonucleotide
gagacagaagaaagtaatcggaagtcgggtagctagctgttatggctattgctgaaacagcaaaatt

SEQ ID NO: 1050 - DNA, 65 bp, Artificial Sequence
  Synthetic oligonucleotide
acagtagagtaatatagtccgcgcacgtacccttacgacttcactgcaattgacgattcagttaa

SEQ ID NO: 1051 - DNA, 67 bp, Artificial Sequence
  Synthetic oligonucleotide
gagacagcaaaaaggtggttgtataaagtgcccctcataccaatgtaaagtatagttaacgccctgt

SEQ ID NO: 1052 - DNA, 61 bp, Artificial Sequence
  Synthetic oligonucleotide
gagacaggatggcacagtggagtaagcatctccatgactgcttgagcggctggagaatctg

SEQ ID NO: 1053 - DNA, 58 bp, Artificial Sequence
  Synthetic oligonucleotide
acagtagaggtcaccgcacgtacctttcgccacccatataaaccccacttcgtcctca

SEQ ID NO: 1054 - DNA, 60 bp, Artificial Sequence
  Synthetic oligonucleotide
cggtagaggttctgtacgcacgtaccaaggcagagcaaatgtgacactgtctatcagtac

SEQ ID NO: 1055 - DNA, 53 bp, Artificial Sequence
  Synthetic oligonucleotide
gggaggggacgcacgtaccctacatatataggaaaagggaaggtagaagagct

SEQ ID NO: 1056 - DNA, 66 bp, Artificial Sequence
  Synthetic oligonucleotide
gagacaggaaaatcgcatacgtcttgcatacccttctggaatttcttcctttgattttgccatttt

SEQ ID NO: 1057 - DNA, 59 bp, Artificial Sequence
  Synthetic oligonucleotide
gaggtggatcggtctagcacgtacctcctaaggttgctgatttggttgttggagaccca

SEQ ID NO: 1058 - DNA, 61 bp, Artificial Sequence
  Synthetic oligonucleotide
acggtagagctaagctagcacgtactcaaggcctagcctaaaggttcttgcagagcaacat

SEQ ID NO: 1059 - DNA, 53 bp, Artificial Sequence
  Synthetic oligonucleotide
cggcctgcagcacgtactcctaattagctctaggaaacacaaccccgggattt

SEQ ID NO: 1060 - DNA, 56 bp, Artificial Sequence
  Synthetic oligonucleotide
gaacgcctgaccagcacgtaccttgagttatacggaacttcgcaaaagtattccct

SEQ ID NO: 1061 - DNA, 73 bp, Artificial Sequence
  Synthetic oligonucleotide
gagacagaaatgcacagtagagtaaaatatcttgcctgccatccatcaacaactgctccaacagcctttccat

SEQ ID NO: 1062 - DNA, 62 bp, Artificial Sequence
  Synthetic oligonucleotide
gagacaggcacagtagaggtgaggataccggcacaagcagacaaaatcaacatggtcattta

SEQ ID NO: 1063 - DNA, 60 bp, Artificial Sequence
  Synthetic oligonucleotide
gagacagggcataaagggcacagtacgctcacgtgatctaccctagctgaccgctaatga

SEQ ID NO: 1064 - DNA, 60 bp, Artificial Sequence
  Synthetic oligonucleotide
gagacagtcaaggagcacggtagagctctaacctgcatacatatggcatttagttgttca

SEQ ID NO: 1065 - DNA, 63 bp, Artificial Sequence
  Synthetic oligonucleotide
ggcacggtagagaaatcgcataacgtacccttcttgaagacctatgtaaagaaacgggtcact

SEQ ID NO: 1066 - DNA, 66 bp, Artificial Sequence
  Synthetic oligonucleotide
gagacagaggataaggtcgtgtaataggtggccatacgcatgactacattacaacgggccaggaag

SEQ ID NO: 1067 - DNA, 64 bp, Artificial Sequence
  Synthetic oligonucleotide
gagacagagaagaaagtaagcgttggcaccaggtctcgatctcgtacaaaacgactatgaccat

SEQ ID NO: 1068 - DNA, 60 bp, Artificial Sequence
  Synthetic oligonucleotide
ccggctatgactgcttgaacgtactcatgaacgtgtcgtgttatgcagcggtatgtcgtg

SEQ ID NO: 1069 - DNA, 59 bp, Artificial Sequence
  Synthetic oligonucleotide
gagacagtttggtggcacggtagacgtcgtgtcttagacgactgtgtgtgattctcgag

SEQ ID NO: 1070 - DNA, 58 bp, Artificial Sequence
  Synthetic oligonucleotide
gcgaaatgactgcgcaacgtactccaccgttttgccagttccaccagtaactgtaagg

SEQ ID NO: 1071 - DNA, 61 bp, Artificial Sequence
  Synthetic oligonucleotide
agagtactaccgcctgacaacgtactcgccctggaacaacggttatattctctggcagaac

SEQ ID NO: 1072 - DNA, 38 bp, Artificial Sequence
  Synthetic oligonucleotide
tcggacttgatctacacattgacacattgataccctga

SEQ ID NO: 1073 - DNA, 37 bp, Artificial Sequence
  Synthetic oligonucleotide
cgtttgacttagacggactgccttgatcactgactga

SEQ ID NO: 1074 - DNA, 37 bp, Artificial Sequence
  Synthetic oligonucleotide
gagttctccttaaaatctgaccctgacaacgagtgga

SEQ ID NO: 1075 - DNA, 38 bp, Artificial Sequence
  Synthetic oligonucleotide
atactggaggtcatgattctgatcccgtgatattctga

SEQ ID NO: 1076 - DNA, 38 bp, Artificial Sequence
  Synthetic oligonucleotide
ggatacacgggagtctgcgttgacacattttgatttga

SEQ ID NO: 1077 - DNA, 38 bp, Artificial Sequence
  Synthetic oligonucleotide
gtttgcaattgcttaggatactcaacctgactccatga

SEQ ID NO: 1078 - DNA, 38 bp, Artificial Sequence
  Synthetic oligonucleotide
gcggtatttatgataatgactcgtgaccccaatattga

SEQ ID NO: 1079 - DNA, 38 bp, Artificial Sequence
  Synthetic oligonucleotide
ggtcagctagtaaagtttatccgatgatttgattttga

SEQ ID NO: 1080 - DNA, 37 bp, Artificial Sequence
  Synthetic oligonucleotide
gcaggatagtcatgcaaaatattcaacgataattaga

SEQ ID NO: 1081 - DNA, 38 bp, Artificial Sequence
  Synthetic oligonucleotide
tgtgactataacgcactaagccgattctgacgatatga

SEQ ID NO: 1082 - DNA, 38 bp, Artificial Sequence
  Synthetic oligonucleotide
ttttgtacctgcttcgataaccaacagttaggatttga

SEQ ID NO: 1083 - DNA, 38 bp, Artificial Sequence
  Synthetic oligonucleotide
gactatcaaatgaccccgatcgatacgtaggacactga

SEQ ID NO: 1084 - DNA, 36 bp, Artificial Sequence
  Synthetic oligonucleotide
aactggccgtgtgtgccggtgggataactgttacta

SEQ ID NO: 1085 - DNA, 36 bp, Artificial Sequence
  Synthetic oligonucleotide
gaggactagccgatacttgataatgattatgacgta

SEQ ID NO: 1086 - DNA, 37 bp, Artificial Sequence
  Synthetic oligonucleotide
gtgaatgacacacgtctgaccttggatcgctgattga

SEQ ID NO: 1087 - DNA, 38 bp, Artificial Sequence
  Synthetic oligonucleotide
accgtggacttattgcttatattggacttagagcctga

SEQ ID NO: 1088 - DNA, 36 bp, Artificial Sequence
  Synthetic oligonucleotide
gaggacgtacgccttgatgtttaactggattactga

SEQ ID NO: 1089 - DNA, 36 bp, Artificial Sequence
  Synthetic oligonucleotide
caccccttttgattatccttattgatacttatatga

SEQ ID NO: 1090 - DNA, 38 bp, Artificial Sequence
  Synthetic oligonucleotide
tcccgtgatgtgggaacgtagatctttgactgatttga

SEQ ID NO: 1091 - DNA, 38 bp, Artificial Sequence
  Synthetic oligonucleotide
tcgtaatgcccaataaccaactggttaagtagacctga

SEQ ID NO: 1092 - DNA, 36 bp, Artificial Sequence
  Synthetic oligonucleotide
gcgatcacaatttaccggaccgatctccctagacaa

SEQ ID NO: 1093 - DNA, 36 bp, Artificial Sequence
  Synthetic oligonucleotide
gcgtacggaacggaaccgacacaacctgaataccta

SEQ ID NO: 1094 - DNA, 36 bp, Artificial Sequence
  Synthetic oligonucleotide
gcgtacggaacggaaccgacacaacctgaataccga

SEQ ID NO: 1095 - DNA, 38 bp, Artificial Sequence
  Synthetic oligonucleotide
gcttgaatccacgacgaaattacttaaaataaccctga

SEQ ID NO: 1096 - DNA, 38 bp, Artificial Sequence
  Synthetic oligonucleotide
gccggggcggagcctacgatttatatcgcgattattga

SEQ ID NO: 1097 - DNA, 38 bp, Artificial Sequence
  Synthetic oligonucleotide
aagtgcacactgcctcgatttacatttcggacctatga

SEQ ID NO: 1098 - DNA, 38 bp, Artificial Sequence
  Synthetic oligonucleotide
gcgtactgtgcgcgattccgggatatatattcgattga

SEQ ID NO: 1099 - DNA, 38 bp, Artificial Sequence
  Synthetic oligonucleotide
cacagacgttctcgttgatacccggacccgatatttga

SEQ ID NO: 1100 - DNA, 38 bp, Artificial Sequence
  Synthetic oligonucleotide
tccattttggaacgtcgaattactcggatactaattga

SEQ ID NO: 1101 - DNA, 38 bp, Artificial Sequence
  Synthetic oligonucleotide
actcgacgtaaaactatctgtgactcctaatacattga

SEQ ID NO: 1102 - DNA, 38 bp, Artificial Sequence
  Synthetic oligonucleotide
accgtaacttgctagccttccggatccctccaatctga

SEQ ID NO: 1103 - DNA, 38 bp, Artificial Sequence
  Synthetic oligonucleotide
ttcgtacagatacccccgataccccgccacctgattga

SEQ ID NO: 1104 - DNA, 34 bp, Artificial Sequence
  Synthetic oligonucleotide
atattaatgccttgatccgactccgacctcttga

SEQ ID NO: 1105 - DNA, 38 bp, Artificial Sequence
  Synthetic oligonucleotide
ttgacgcgacgtactattttgatcgtattccaatctga

SEQ ID NO: 1106 - DNA, 38 bp, Artificial Sequence
  Synthetic oligonucleotide
gcgccgccacggtacttaaaaactcggactttacttga

SEQ ID NO: 1107 - DNA, 38 bp, Artificial Sequence
  Synthetic oligonucleotide
cgtagtactgctacatccgaaccgaccataaatactga

SEQ ID NO: 1108 - DNA, 38 bp, Artificial Sequence
  Synthetic oligonucleotide
gaggacgcagttgaccggatttccaccgattatattga

SEQ ID NO: 1109 - DNA, 38 bp, Artificial Sequence
  Synthetic oligonucleotide
gaggactgaaccatctcggaccacccatggatacttga

SEQ ID NO: 1110 - DNA, 38 bp, Artificial Sequence
  Synthetic oligonucleotide
tgcgcgagcaaacgcgactattgaaccttagaacctga

SEQ ID NO: 1111 - DNA, 35 bp, Artificial Sequence
  Synthetic oligonucleotide
gctggtgacccctcttgaccttccttattgatttg

SEQ ID NO: 1112 - DNA, 38 bp, Artificial Sequence
  Synthetic oligonucleotide
gagtacctcaccgctttcgattatcgttctgaccttga

SEQ ID NO: 1113 - DNA, 36 bp, Artificial Sequence
  Synthetic oligonucleotide
agccacttcctgctttgaaccggactccttatataa

SEQ ID NO: 1114 - DNA, 38 bp, Artificial Sequence
  Synthetic oligonucleotide
attgagcgtacgcatctaccggattaccttacttttga

SEQ ID NO: 1115 - DNA, 37 bp, Artificial Sequence
  Synthetic oligonucleotide
gaacttacgttactaacctgactctatcttacattga

SEQ ID NO: 1116 - DNA, 37 bp, Artificial Sequence
  Synthetic oligonucleotide
gcaccactattgtgggaattcctgattttactattga

SEQ ID NO: 1117 - DNA, 37 bp, Artificial Sequence
  Synthetic oligonucleotide
gcgtgcctgcctggctctgactccgattattcattga

SEQ ID NO: 1118 - DNA, 38 bp, Artificial Sequence
  Synthetic oligonucleotide
agttccttactaacacaacttttggatatttaaattga

SEQ ID NO: 1119 - DNA, 37 bp, Artificial Sequence
  Synthetic oligonucleotide
actgccttttcttactgggatacttattgattattga

SEQ ID NO: 1120 - DNA, 38 bp, Artificial Sequence
  Synthetic oligonucleotide
atagtacactacctactgactccctatattatgaatga

SEQ ID NO: 1121 - DNA, 38 bp, Artificial Sequence
  Synthetic oligonucleotide
gcgatacaacccttcatttctgactaccgatatattga

SEQ ID NO: 1122 - DNA, 36 bp, Artificial Sequence
  Synthetic oligonucleotide
gcatctttcttcttaatgatttaccgttctcacata

SEQ ID NO: 1123 - DNA, 36 bp, Artificial Sequence
  Synthetic oligonucleotide
accacgtgttattctctgtatttcactttgtctcaa

SEQ ID NO: 1124 - DNA, 36 bp, Artificial Sequence
  Synthetic oligonucleotide
accgggaacatttctgtcgtttcatttcatcactaa

SEQ ID NO: 1125 - DNA, 36 bp, Artificial Sequence
  Synthetic oligonucleotide
agtttattgctccttcccactattgtctatctcgca

SEQ ID NO: 1126 - DNA, 36 bp, Artificial Sequence
  Synthetic oligonucleotide
tcgcttccttgtacttcctatacccttttcaccaca

SEQ ID NO: 1127 - DNA, 35 bp, Artificial Sequence
  Synthetic oligonucleotide
actaactcgcccactcttctcatttggaacctatc

SEQ ID NO: 1128 - DNA, 36 bp, Artificial Sequence
  Synthetic oligonucleotide
actccccctcagctatcatacatcactcgcatctaa

SEQ ID NO: 1129 - DNA, 38 bp, Artificial Sequence
  Synthetic oligonucleotide
aatatatacgcgctacaaatcttttctcctactgatga

SEQ ID NO: 1130 - DNA, 37 bp, Artificial Sequence
  Synthetic oligonucleotide
actatactcacatcctatttaattattggcttaatga

SEQ ID NO: 1131 - DNA, 38 bp, Artificial Sequence
  Synthetic oligonucleotide
atcgatcctgcctaacctggtaaacaactcatttctga

SEQ ID NO: 1132 - DNA, 35 bp, Artificial Sequence
  Synthetic oligonucleotide
ttagctgcttcccagacccaagctattatttttca

SEQ ID NO: 1133 - DNA, 36 bp, Artificial Sequence
  Synthetic oligonucleotide
tccctgcatcttaacttctatagggtttgcttaaaa

SEQ ID NO: 1134 - DNA, 36 bp, Artificial Sequence
  Synthetic oligonucleotide
gggtcactccgtaaggcctctactccaaattataaa

SEQ ID NO: 1135 - DNA, 36 bp, Artificial Sequence
  Synthetic oligonucleotide
aactgtacggcgcaattttactctcaagtaccaaca

SEQ ID NO: 1136 - DNA, 35 bp, Artificial Sequence
  Synthetic oligonucleotide
tgcggactttattcgcttgatgcctatcctgttat

SEQ ID NO: 1137 - DNA, 36 bp, Artificial Sequence
  Synthetic oligonucleotide
tccgccacatcgggttatacttttgaactagttaaa

SEQ ID NO: 1138 - DNA, 38 bp, Artificial Sequence
  Synthetic oligonucleotide
tgttccttcgagttccatcccaaagagttaattcatga

SEQ ID NO: 1139 - DNA, 35 bp, Artificial Sequence
  Synthetic oligonucleotide
tcctgcgactctacggtatattcctttaatcgaca

SEQ ID NO: 1140 - DNA, 38 bp, Artificial Sequence
  Synthetic oligonucleotide
agtaaaattccggttcatccacactgagctttcaatga

SEQ ID NO: 1141 - DNA, 36 bp, Artificial Sequence
  Synthetic oligonucleotide
ttaactccttgaagtacgtcctaggccccctcacca

SEQ ID NO: 1142 - DNA, 36 bp, Artificial Sequence
  Synthetic oligonucleotide
tggagtactggtgccgaacgtttttgaacgggttga

SEQ ID NO: 1143 - DNA, 38 bp, Artificial Sequence
  Synthetic oligonucleotide
gagtactatagagccaagacctcatttagtcactctga

SEQ ID NO: 1144 - DNA, 36 bp, Artificial Sequence
  Synthetic oligonucleotide
ccgacccataacactttcgcttcaagcatctaggca

SEQ ID NO: 1145 - DNA, 36 bp, Artificial Sequence
  Synthetic oligonucleotide
cgtccgcacccctttttcaccttgttctgctatgca

SEQ ID NO: 1146 - DNA, 35 bp, Artificial Sequence
  Synthetic oligonucleotide
gagcctctgtaacccaatcttcaactgcagggacc

SEQ ID NO: 1147 - DNA, 35 bp, Artificial Sequence
  Synthetic oligonucleotide
gagttctccagctagatattccaatacggaaccga

SEQ ID NO: 1148 - DNA, 38 bp, Artificial Sequence
  Synthetic oligonucleotide
gagtattgcgaagattgggtttatcggttctaacatga

SEQ ID NO: 1149 - DNA, 37 bp, Artificial Sequence
  Synthetic oligonucleotide
aaacgctattacggctgacccggtgactcgggattga

SEQ ID NO: 1150 - DNA, 36 bp, Artificial Sequence
  Synthetic oligonucleotide
accgactccagtttcacgggaatattctcaccggga

SEQ ID NO: 1151 - DNA, 38 bp, Artificial Sequence
  Synthetic oligonucleotide
gttgtcggtttccattagttcgatatcttgccgtgaga

SEQ ID NO: 1152 - DNA, 38 bp, Artificial Sequence
  Synthetic oligonucleotide
atgggaatcacgtagctgtaacgataatccatgggtga

SEQ ID NO: 1153 - DNA, 35 bp, Artificial Sequence
  Synthetic oligonucleotide
aggtactgacgattctttaaagtgactactggtga

SEQ ID NO: 1154 - DNA, 38 bp, Artificial Sequence
  Synthetic oligonucleotide
ggcggtggaagtccgaactgccgagttaaattccctga

SEQ ID NO: 1155 - DNA, 38 bp, Artificial Sequence
  Synthetic oligonucleotide
tatcggtcttacgaaagccggcacgtacgtttctttga

SEQ ID NO: 1156 - DNA, 38 bp, Artificial Sequence
  Synthetic oligonucleotide
tgacggatgataggcatgacctcgtagaccacatctga

SEQ ID NO: 1157 - DNA, 38 bp, Artificial Sequence
  Synthetic oligonucleotide
tttgtaccatccttacaaatgagatcttgttatgttga

SEQ ID NO: 1158 - DNA, 36 bp, Artificial Sequence
  Synthetic oligonucleotide
tacatgcgtactataaaccctattgtttactggtaa

SEQ ID NO: 1159 - DNA, 35 bp, Artificial Sequence
  Synthetic oligonucleotide
gcaagtctagatcttcattcatttgttcatgtttt

SEQ ID NO: 1160 - DNA, 35 bp, Artificial Sequence
  Synthetic oligonucleotide
gagtttgcgggaatcttccccgaacaaggggctaa

SEQ ID NO: 1161 - DNA, 35 bp, Artificial Sequence
  Synthetic oligonucleotide
tagaccgttggaggtccggggttggtgcccgatta

SEQ ID NO: 1162 - DNA, 37 bp, Artificial Sequence
  Synthetic oligonucleotide
acactcatacgagatctgattatacacgcgccttgga

SEQ ID NO: 1163 - DNA, 37 bp, Artificial Sequence
  Synthetic oligonucleotide
gtcgtcgggagaccacttatcttttttccatgccgga

SEQ ID NO: 1164 - DNA, 35 bp, Artificial Sequence
  Synthetic oligonucleotide
tcacctgacgttacactcctccgtacaaacgtgta

SEQ ID NO: 1165 - DNA, 35 bp, Artificial Sequence
  Synthetic oligonucleotide
tcctgattaattcatggtcacaactcccggtttcc

SEQ ID NO: 1166 - DNA, 36 bp, Artificial Sequence
  Synthetic oligonucleotide
tccttttgcccatgattattctcgatgtaaaaacga

SEQ ID NO: 1167 - DNA, 37 bp, Artificial Sequence
  Synthetic oligonucleotide
aacgctaatatctgccgatgggaatcctcgattagga

SEQ ID NO: 1168 - DNA, 37 bp, Artificial Sequence
  Synthetic oligonucleotide
agggtgatatttacgttatcttcgaatttctactgga

SEQ ID NO: 1169 - DNA, 36 bp, Artificial Sequence
  Synthetic oligonucleotide
tctcacttacaaagcgtttaatcaacgcagttctta

SEQ ID NO: 1170 - DNA, 37 bp, Artificial Sequence
  Synthetic oligonucleotide
ccgcaaacttaggggctaataattttcgttatccgga

SEQ ID NO: 1171 - DNA, 37 bp, Artificial Sequence
  Synthetic oligonucleotide
tgccagaaaatcgaatttttatacgtaatggcatgga

SEQ ID NO: 1172 - DNA, 35 bp, Artificial Sequence
  Synthetic oligonucleotide
atcgatcctgacgccgaaaacttgacacgactaaa

SEQ ID NO: 1173 - DNA, 35 bp, Artificial Sequence
  Synthetic oligonucleotide
atgctggtaacttttgcacatcttacttggtaaac

SEQ ID NO: 1174 - DNA, 36 bp, Artificial Sequence
  Synthetic oligonucleotide
gcgattactcagcacccccttacttgtttttaatca

SEQ ID NO: 1175 - DNA, 35 bp, Artificial Sequence
  Synthetic oligonucleotide
actgcgggactatctgaattattggtattataaca

SEQ ID NO: 1176 - DNA, 36 bp, Artificial Sequence
  Synthetic oligonucleotide
gagtactgaaggaactggaaccgagtattcttgtca

SEQ ID NO: 1177 - DNA, 36 bp, Artificial Sequence
  Synthetic oligonucleotide
gagaactgcctggtaatatattcccaaacctggaca

SEQ ID NO: 1178 - DNA, 36 bp, Artificial Sequence
  Synthetic oligonucleotide
gagtgcgtaggtcttacatcctatcgaatatttaca

SEQ ID NO: 1179 - DNA, 36 bp, Artificial Sequence
  Synthetic oligonucleotide
ctcagactttacacaatctttctctccacacaagca

SEQ ID NO: 1180 - DNA, 35 bp, Artificial Sequence
  Synthetic oligonucleotide
gccactttcagaatctcgtgtcacacccatcatca

SEQ ID NO: 1181 - DNA, 36 bp, Artificial Sequence
  Synthetic oligonucleotide
gcgttccccgtggacaatatcactttcttatcgtca

SEQ ID NO: 1182 - DNA, 35 bp, Artificial Sequence
  Synthetic oligonucleotide
tcctggtctacgacttacatctgatccgacccaaa

SEQ ID NO: 1183 - DNA, 36 bp, Artificial Sequence
  Synthetic oligonucleotide
ggaccttatttgttcgacccccgttatcacctgaaa

SEQ ID NO: 1184 - DNA, 35 bp, Artificial Sequence
  Synthetic oligonucleotide
gaggacttttactgatcaaccccacctttcgaaaa

SEQ ID NO: 1185 - DNA, 36 bp, Artificial Sequence
  Synthetic oligonucleotide
gctactacttatccgactactctaaaaacaactaca

SEQ ID NO: 1186 - DNA, 35 bp, Artificial Sequence
  Synthetic oligonucleotide
aactgtcatccgccgactaactcaatctaactcaa

SEQ ID NO: 1187 - DNA, 35 bp, Artificial Sequence
  Synthetic oligonucleotide
aactgtcatccgccgactaactcaatctaactcta

SEQ ID NO: 1188 - DNA, 35 bp, Artificial Sequence
  Synthetic oligonucleotide
aactgtcatccgccgactaactcaatctaactcga

SEQ ID NO: 1189 - DNA, 35 bp, Artificial Sequence
  Synthetic oligonucleotide
tactccggcccaactatatacttctccacaccaac

SEQ ID NO: 1190 - DNA, 35 bp, Artificial Sequence
  Synthetic oligonucleotide
tactccggcccaactatatacttctccacaccatc

SEQ ID NO: 1191 - DNA, 35 bp, Artificial Sequence
  Synthetic oligonucleotide
tactccggcccaactatatacttctccacaccagc

SEQ ID NO: 1192 - DNA, 35 bp, Artificial Sequence
  Synthetic oligonucleotide
tcctacctgcccaatccccttttgattacatatat

SEQ ID NO: 1193 - DNA, 35 bp, Artificial Sequence
  Synthetic oligonucleotide
ccacgctttggggacgctattactatccctttcaa

SEQ ID NO: 1194 - DNA, 35 bp, Artificial Sequence
  Synthetic oligonucleotide
aatgtactgataatcccttttacactggttactat

SEQ ID NO: 1195 - DNA, 35 bp, Artificial Sequence
  Synthetic oligonucleotide
ttagtcgtacttttatctatattgggcctaataaa

SEQ ID NO: 1196 - DNA, 36 bp, Artificial Sequence
  Synthetic oligonucleotide
ttcgccacgttcctaaatattttacttattactaaa

SEQ ID NO: 1197 - DNA, 36 bp, Artificial Sequence
  Synthetic oligonucleotide
ttccatgactctgcctatacttattatatctcataa

SEQ ID NO: 1198 - DNA, 36 bp, Artificial Sequence
  Synthetic oligonucleotide
ttggagctacaatcaaacttcatatctctttctaaa

SEQ ID NO: 1199 - DNA, 36 bp, Artificial Sequence
  Synthetic oligonucleotide
tgcccaaaactgcctttagaaacttattacattcaa

SEQ ID NO: 1200 - DNA, 36 bp, Artificial Sequence
  Synthetic oligonucleotide
tctgcgatcgccatttatctcgaccctttacctaaa

SEQ ID NO: 1201 - DNA, 35 bp, Artificial Sequence
  Synthetic oligonucleotide
aacttttttgcactaacctggacctcatatataat

SEQ ID NO: 1202 - DNA, 34 bp, Artificial Sequence
  Synthetic oligonucleotide
aaccgcttttcacactaccactcacgctctcata

SEQ ID NO: 1203 - DNA, 36 bp, Artificial Sequence
  Synthetic oligonucleotide
ccgccgtacccacgctccaattattctcatcctaca

SEQ ID NO: 1204 - DNA, 36 bp, Artificial Sequence
  Synthetic oligonucleotide
tatctccgtccaacacatctctggtcaccacctcca

SEQ ID NO: 1205 - DNA, 35 bp, Artificial Sequence
  Synthetic oligonucleotide
tttctccgctcatcataactgacgccatccactca

SEQ ID NO: 1206 - DNA, 35 bp, Artificial Sequence
  Synthetic oligonucleotide
acttcgctcattcacttgccaactcctgcacaatc

SEQ ID NO: 1207 - DNA, 37 bp, Artificial Sequence
  Synthetic oligonucleotide
tccctcaccgttgcccttattccgtactcacttatga

SEQ ID NO: 1208 - DNA, 36 bp, Artificial Sequence
  Synthetic oligonucleotide
gtgcttctccttttgactcgcctcactcttggtcca

SEQ ID NO: 1209 - DNA, 36 bp, Artificial Sequence
  Synthetic oligonucleotide
ttttctcctcactccgctccgtgccttgacatcaaa

SEQ ID NO: 1210 - DNA, 37 bp, Artificial Sequence
  Synthetic oligonucleotide
taccttcttcaatatccgtccgcttaacctggattca

SEQ ID NO: 1211 - DNA, 36 bp, Artificial Sequence
  Synthetic oligonucleotide
cctcctctgcctaaatacgttttctccaccatcata

SEQ ID NO: 1212 - DNA, 36 bp, Artificial Sequence
  Synthetic oligonucleotide
acttttttaaattttgttcccacgtatccttaatta

SEQ ID NO: 1213 - DNA, 38 bp, Artificial Sequence
  Synthetic oligonucleotide
ttttccgggtttcttctccagtaggttgacttttatga

SEQ ID NO: 1214 - DNA, 35 bp, Artificial Sequence
  Synthetic oligonucleotide
tgttttggcctccacggtttagtacttattttttt

SEQ ID NO: 1215 - DNA, 35 bp, Artificial Sequence
  Synthetic oligonucleotide
gacttttttgctcatattttcaccaatcaattcca

SEQ ID NO: 1216 - DNA, 36 bp, Artificial Sequence
  Synthetic oligonucleotide
tgagttctcttttatattggtcgccactttttccaa

SEQ ID NO: 1217 - DNA, 36 bp, Artificial Sequence
  Synthetic oligonucleotide
ttccttcacttgggctttcaaatcatttataaacaa

SEQ ID NO: 1218 - DNA, 38 bp, Artificial Sequence
  Synthetic oligonucleotide
ttcttgacttcagttcgattttgttattcttagtttga

SEQ ID NO: 1219 - DNA, 38 bp, Artificial Sequence
  Synthetic oligonucleotide
gttaattccttgctcgagtttttccgcttattccttga

SEQ ID NO: 1220 - DNA, 37 bp, Artificial Sequence
  Synthetic oligonucleotide
ggtacatttcgtccctaccattggtttattcttttga

SEQ ID NO: 1221 - DNA, 37 bp, Artificial Sequence
  Synthetic oligonucleotide
attatttttcgttctctcacttgttttcgatcattga

SEQ ID NO: 1222 - DNA, 35 bp, Artificial Sequence
  Synthetic oligonucleotide
taattgagcttttgctcctaacggcgagagccgtt

SEQ ID NO: 1223 - DNA, 36 bp, Artificial Sequence
  Synthetic oligonucleotide
tgatatacgcgcgagtagaacatcaaccagtgagaa

SEQ ID NO: 1224 - DNA, 38 bp, Artificial Sequence
  Synthetic oligonucleotide
taagccgagcgcatgtaggttcgttttcacgagagtga

SEQ ID NO: 1225 - DNA, 35 bp, Artificial Sequence
  Synthetic oligonucleotide
atgaacgcgagtgaggacgctttagttaattatgt

SEQ ID NO: 1226 - DNA, 37 bp, Artificial Sequence
  Synthetic oligonucleotide
actcggatagcggggccgggggaggcctacacattga

SEQ ID NO: 1227 - DNA, 38 bp, Artificial Sequence
  Synthetic oligonucleotide
acgcagtccgtaaattgataaccgggaggttcgagtga

SEQ ID NO: 1228 - DNA, 35 bp, Artificial Sequence
  Synthetic oligonucleotide
agtcccacgagagtggttctctctagataagagga

SEQ ID NO: 1229 - DNA, 37 bp, Artificial Sequence
  Synthetic oligonucleotide
gagtaccataacaaggcctgaagaaccttgcaggtga

SEQ ID NO: 1230 - DNA, 38 bp, Artificial Sequence
  Synthetic oligonucleotide
gcggggtgtgaacccgctcgtatgtaacaacggattga

SEQ ID NO: 1231 - DNA, 37 bp, Artificial Sequence
  Synthetic oligonucleotide
gagtacggttacggtgagtaaccatttagacgtaaga

SEQ ID NO: 1232 - DNA, 38 bp, Artificial Sequence
  Synthetic oligonucleotide
tgggatccgcgaggatctgatggggttcttatgtttga

SEQ ID NO: 1233 - DNA, 36 bp, Artificial Sequence
  Synthetic oligonucleotide
gagtacccgggcagggagccagttattatgttttga

SEQ ID NO: 1234 - DNA, 36 bp, Artificial Sequence
  Synthetic oligonucleotide
gagtacctagatatctcaaaagatatttatcgttaa

SEQ ID NO: 1235 - DNA, 35 bp, Artificial Sequence
  Synthetic oligonucleotide
gagtactctgcgcaagtgttgaactttgtagaaat

SEQ ID NO: 1236 - DNA, 36 bp, Artificial Sequence
  Synthetic oligonucleotide
gagtacttcccgcggggttatggaatgaattggata

SEQ ID NO: 1237 - DNA, 38 bp, Artificial Sequence
  Synthetic oligonucleotide
taatgtctcttccgccgtagtacgagcggttccgctga

SEQ ID NO: 1238 - DNA, 38 bp, Artificial Sequence
  Synthetic oligonucleotide
gagtacagccgcccttgtaccgaggccttattaagtga

SEQ ID NO: 1239 - DNA, 38 bp, Artificial Sequence
  Synthetic oligonucleotide
ttagtttaccgtcaaaggcctcataatgttacaactga

SEQ ID NO: 1240 - DNA, 38 bp, Artificial Sequence
  Synthetic oligonucleotide
cgtagtattgcgggctcgtctcattgcattcctattga

SEQ ID NO: 1241 - DNA, 38 bp, Artificial Sequence
  Synthetic oligonucleotide
cgtgagacgtggttgcccaccacagtgaataaatttga

SEQ ID NO: 1242 - DNA, 37 bp, Artificial Sequence
  Synthetic oligonucleotide
gctccactatttaaccgtgagttgttaaccgggggga

SEQ ID NO: 1243 - DNA, 37 bp, Artificial Sequence
  Synthetic oligonucleotide
gctccagtaccgctgtacgaattatttaagaaaacga

SEQ ID NO: 1244 - DNA, 36 bp, Artificial Sequence
  Synthetic oligonucleotide
gcccacatttttttcgagtgtgtaaggggtgagaaa

SEQ ID NO: 1245 - DNA, 37 bp, Artificial Sequence
  Synthetic oligonucleotide
gcttattccggatgttgcctgcaattaggggactcga

SEQ ID NO: 1246 - DNA, 37 bp, Artificial Sequence
  Synthetic oligonucleotide
gcttgtctcgcggttttgaaagtaatctttaacgaga

SEQ ID NO: 1247 - DNA, 35 bp, Artificial Sequence
  Synthetic oligonucleotide
gcgcgaaagctcaaataaaactaaagtacaacaaa

SEQ ID NO: 1248 - DNA, 36 bp, Artificial Sequence
  Synthetic oligonucleotide
gctaagctgggagaaaatcacaccctcgatcgtaaa

SEQ ID NO: 1249 - DNA, 37 bp, Artificial Sequence
  Synthetic oligonucleotide
ctcacattagggctcggtaaatataacgatctgacga

SEQ ID NO: 1250 - DNA, 35 bp, Artificial Sequence
  Synthetic oligonucleotide
actgtagctattatgaaagtctgggttattggcct

SEQ ID NO: 1251 - DNA, 35 bp, Artificial Sequence
  Synthetic oligonucleotide
aatcgtatggagcgttgaacaaatgaacccgtagt

SEQ ID NO: 1252 - DNA, 38 bp, Artificial Sequence
  Synthetic oligonucleotide
agatatacttgaaaggtggtattatgaatgttgggtga

SEQ ID NO: 1253 - DNA, 38 bp, Artificial Sequence
  Synthetic oligonucleotide
atggtgactcaattaaaatgtgaggtgggggagctaga

SEQ ID NO: 1254 - DNA, 37 bp, Artificial Sequence
  Synthetic oligonucleotide
tcgtggagggtattgaccttctaatgatgggggggga

SEQ ID NO: 1255 - DNA, 38 bp, Artificial Sequence
  Synthetic oligonucleotide
ggttcctatgaaggacacggggggggaggtatcaatga

SEQ ID NO: 1256 - DNA, 37 bp, Artificial Sequence
  Synthetic oligonucleotide
aaggggcggtagactttaggggctgaatggggtggga

SEQ ID NO: 1257 - DNA, 37 bp, Artificial Sequence
  Synthetic oligonucleotide
gagtgcactggatgaattttgaggggggaaggaccga

SEQ ID NO: 1258 - DNA, 37 bp, Artificial Sequence
  Synthetic oligonucleotide
tgcggtgggtggtgggtgggaaataattatgtgggga

SEQ ID NO: 1259 - DNA, 37 bp, Artificial Sequence
  Synthetic oligonucleotide
taccagactggaagtcaatgatcatggttgtctccga

SEQ ID NO: 1260 - DNA, 36 bp, Artificial Sequence
  Synthetic oligonucleotide
aacggtacaacatctgctagagaactgcaacttcta

SEQ ID NO: 1261 - DNA, 36 bp, Artificial Sequence
  Synthetic oligonucleotide
actatatccaatgctatgcgcgcattcagggtagaa

SEQ ID NO: 1262 - DNA, 35 bp, Artificial Sequence
  Synthetic oligonucleotide
agcatcggccgatcgcctcaatcacgttttcgatt

SEQ ID NO: 1263 - DNA, 38 bp, Artificial Sequence
  Synthetic oligonucleotide
aggcttacaatacgttaccccttcttcgtagacggtga

SEQ ID NO: 1264 - DNA, 36 bp, Artificial Sequence
  Synthetic oligonucleotide
cttgacgtcacatttgcctaacactgtaggtcacaa

SEQ ID NO: 1265 - DNA, 35 bp, Artificial Sequence
  Synthetic oligonucleotide
tctggtagcacatgagtttggcattcctctctgca

SEQ ID NO: 1266 - DNA, 35 bp, Artificial Sequence
  Synthetic oligonucleotide
tgttgtccgtatatattccttgtgtgttaattccg

SEQ ID NO: 1267 - DNA, 35 bp, Artificial Sequence
  Synthetic oligonucleotide
gagcactataagtgtgtatctatttgtaactttct

SEQ ID NO: 1268 - DNA, 35 bp, Artificial Sequence
  Synthetic oligonucleotide
tgtggaggcactcttgtatgattgatttcgtatct

SEQ ID NO: 1269 - DNA, 36 bp, Artificial Sequence
  Synthetic oligonucleotide
aatctaacgcatcaaatacgtttgggtagtcattaa

SEQ ID NO: 1270 - DNA, 35 bp, Artificial Sequence
  Synthetic oligonucleotide
tggtcaacgttatcgtatcctactgatcactaact

SEQ ID NO: 1271 - DNA, 36 bp, Artificial Sequence
  Synthetic oligonucleotide
ttgtcgcaccacatcataggtgccacgatgtcccaa

SEQ ID NO: 1272 - DNA, 36 bp, Artificial Sequence
  Synthetic oligonucleotide
actgttacaacagaagggttagatcacatactacaa

SEQ ID NO: 1273 - DNA, 35 bp, Artificial Sequence
  Synthetic oligonucleotide
actcgagggaactaggaactactacaacagtgtgt

SEQ ID NO: 1274 - DNA, 38 bp, Artificial Sequence
  Synthetic oligonucleotide
ccatgaaactacaacatatcaagtcgagtgtggtgtga

SEQ ID NO: 1275 - DNA, 37 bp, Artificial Sequence
  Synthetic oligonucleotide
cggccgacgtagctcaaattctacactatggttgtga

SEQ ID NO: 1276 - DNA, 38 bp, Artificial Sequence
  Synthetic oligonucleotide
ggcagtactatcaacttacatgccaatattcgatgtga

SEQ ID NO: 1277 - DNA, 36 bp, Artificial Sequence
  Synthetic oligonucleotide
gctaccagcgttgcagtctgcggattctgtcaaata

SEQ ID NO: 1278 - DNA, 35 bp, Artificial Sequence
  Synthetic oligonucleotide
cttactcaaagtggcgtgtaggtcattaggttgta

SEQ ID NO: 1279 - DNA, 36 bp, Artificial Sequence
  Synthetic oligonucleotide
cgtagtactagcaacattagggtcgtaacataacta

SEQ ID NO: 1280 - DNA, 36 bp, Artificial Sequence
  Synthetic oligonucleotide
acgaccgtggggttagggcgcatattctttggctta

SEQ ID NO: 1281 - DNA, 37 bp, Artificial Sequence
  Synthetic oligonucleotide
tactctcatgggtatctttctgaatcgaacgttgtga

SEQ ID NO: 1282 - DNA, 35 bp, Artificial Sequence
  Synthetic oligonucleotide
gcggtttaacctcgaaagtaagggcgattaggcga

SEQ ID NO: 1283 - DNA, 35 bp, Artificial Sequence
  Synthetic oligonucleotide
gcgggttcaaattgaggaggaaagacgaaagctct

SEQ ID NO: 1284 - DNA, 38 bp, Artificial Sequence
  Synthetic oligonucleotide
gatcgaatcgatactgcagcggagtgacacgggtctaa

SEQ ID NO: 1285 - DNA, 35 bp, Artificial Sequence
  Synthetic oligonucleotide
tagtccgggtcgttttaaattcagtttggcatttt

SEQ ID NO: 1286 - DNA, 35 bp, Artificial Sequence
  Synthetic oligonucleotide
aaccaggcatagttggccgcaggcaaccccatttt

SEQ ID NO: 1287 - DNA, 35 bp, Artificial Sequence
  Synthetic oligonucleotide
agtccaaacacgaggttccgtcgcgagaactttaa

SEQ ID NO: 1288 - DNA, 37 bp, Artificial Sequence
  Synthetic oligonucleotide
agtccggcaaggggcgcaacttatcatagtcctctga

SEQ ID NO: 1289 - DNA, 35 bp, Artificial Sequence
  Synthetic oligonucleotide
taggctcccgcctttagcttagtttcagatagcaa

SEQ ID NO: 1290 - DNA, 35 bp, Artificial Sequence
  Synthetic oligonucleotide
cgcggtattttgcctcaaactagtcgttaatctat

SEQ ID NO: 1291 - DNA, 37 bp, Artificial Sequence
  Synthetic oligonucleotide
ttacttcgggagctaggctcacccctacattagtgga

SEQ ID NO: 1292 - DNA, 37 bp, Artificial Sequence
  Synthetic oligonucleotide
agtgcaattggatatatcagtgaggagtttcaattga

SEQ ID NO: 1293 - DNA, 37 bp, Artificial Sequence
  Synthetic oligonucleotide
ccgaaatcggggtagattatggggtcctggaaatcga

SEQ ID NO: 1294 - DNA, 38 bp, Artificial Sequence
  Synthetic oligonucleotide
taagtttgtagaatttaacgtatggaacggggacgtga

SEQ ID NO: 1295 - DNA, 35 bp, Artificial Sequence
  Synthetic oligonucleotide
tgagcgagcgcctgatattcggtactgcatatctc

SEQ ID NO: 1296 - DNA, 36 bp, Artificial Sequence
  Synthetic oligonucleotide
gatcgaattaggggaattcgttggaatcgacccata

SEQ ID NO: 1297 - DNA, 38 bp, Artificial Sequence
  Synthetic oligonucleotide
tctgtgcgaagggtttagtctcgggcgaaacttaatga

SEQ ID NO: 1298 - DNA, 38 bp, Artificial Sequence
  Synthetic oligonucleotide
agggaagtcctagttggagtgattttccgtgattctga

SEQ ID NO: 1299 - DNA, 38 bp, Artificial Sequence
  Synthetic oligonucleotide
aggaatggctagtctaagacaaactcctctgtttatga

SEQ ID NO: 1300 - DNA, 37 bp, Artificial Sequence
  Synthetic oligonucleotide
gattgtcacggatgattctggatttatataggtacga

SEQ ID NO: 1301 - DNA, 38 bp, Artificial Sequence
  Synthetic oligonucleotide
attcatgggagcttgaccggagttattgtttgttgtga

SEQ ID NO: 1302 - DNA, 35 bp, Artificial Sequence
  Synthetic oligonucleotide
tatcgaacttagatgtgacactgttttttagtcta

SEQ ID NO: 1303 - DNA, 37 bp, Artificial Sequence
  Synthetic oligonucleotide
agctacggcttatcgttggggtccaagttcatgaaga

SEQ ID NO: 1304 - DNA, 37 bp, Artificial Sequence
  Synthetic oligonucleotide
agtctaccccccaaattgttggtattccgagcataga

SEQ ID NO: 1305 - DNA, 35 bp, Artificial Sequence
  Synthetic oligonucleotide
tcgtcccaagctctggactggtaagttcttatgta

SEQ ID NO: 1306 - DNA, 36 bp, Artificial Sequence
  Synthetic oligonucleotide
tgctacagttcaacctcacgtttttgaactgcgtga

SEQ ID NO: 1307 - DNA, 37 bp, Artificial Sequence
  Synthetic oligonucleotide
cgtttggacgggggtgtccttttttttgatattacga

SEQ ID NO: 1308 - DNA, 37 bp, Artificial Sequence
  Synthetic oligonucleotide
ttcctcgtgttacaggcactttattagcctgtgggga

SEQ ID NO: 1309 - DNA, 36 bp, Artificial Sequence
  Synthetic oligonucleotide
cttggcccgttgaccacgacataatggtcttatata

SEQ ID NO: 1310 - DNA, 36 bp, Artificial Sequence
  Synthetic oligonucleotide
aggatatttaccctgcatcttttcgttacggtatga

SEQ ID NO: 1311 - DNA, 36 bp, Artificial Sequence
  Synthetic oligonucleotide
actgtctggaagtcggaactttcaccattatgatga

SEQ ID NO: 1312 - DNA, 38 bp, Artificial Sequence
  Synthetic oligonucleotide
gaatggaggaactttctcgtattcacgttttgttgtga

SEQ ID NO: 1313 - DNA, 38 bp, Artificial Sequence
  Synthetic oligonucleotide
aaccgttagtgcaaaggggagtacggcctttgttttga

SEQ ID NO: 1314 - DNA, 38 bp, Artificial Sequence
  Synthetic oligonucleotide
ctcgtacgcaaacgctttgaatagaacgtttgtcttga

SEQ ID NO: 1315 - DNA, 37 bp, Artificial Sequence
  Synthetic oligonucleotide
agatacccggtggttatcttaagggtgtgacttttga

SEQ ID NO: 1316 - DNA, 38 bp, Artificial Sequence
  Synthetic oligonucleotide
tagggttcagtatctggcgattctgttgatgttcctga

SEQ ID NO: 1317 - DNA, 38 bp, Artificial Sequence
  Synthetic oligonucleotide
cgagctcccttaagggtgcatcgggattcattgtttga

SEQ ID NO: 1318 - DNA, 38 bp, Artificial Sequence
  Synthetic oligonucleotide
cacatccggagaaggtgcgtttatacatgaatttctga

SEQ ID NO: 1319 - DNA, 38 bp, Artificial Sequence
  Synthetic oligonucleotide
aaggacgacgcggaacaatctgtagctatgactcttga

SEQ ID NO: 1320 - DNA, 37 bp, Artificial Sequence
  Synthetic oligonucleotide
acttgttcctgaagtgggtttgacttgcaaacgttga

SEQ ID NO: 1321 - DNA, 37 bp, Artificial Sequence
  Synthetic oligonucleotide
agtacacgcccgttggtttcgttcggaaattacttga

SEQ ID NO: 1322 - DNA, 37 bp, Artificial Sequence
  Synthetic oligonucleotide
tgaacatctttgttattcaacgggatcacgcaacgga

SEQ ID NO: 1323 - DNA, 36 bp, Artificial Sequence
  Synthetic oligonucleotide
taatccgatgcaatttgtatttactgacaatgcgta

SEQ ID NO: 1324 - DNA, 36 bp, Artificial Sequence
  Synthetic oligonucleotide
aactggaggatcccggaatttatcctcccatacgaa

SEQ ID NO: 1325 - DNA, 37 bp, Artificial Sequence
  Synthetic oligonucleotide
gaattgcggactgacagatagatgcggtgacattgga

SEQ ID NO: 1326 - DNA, 35 bp, Artificial Sequence
  Synthetic oligonucleotide
tcgcactagttctatgagggaaactacaggaacga

SEQ ID NO: 1327 - DNA, 37 bp, Artificial Sequence
  Synthetic oligonucleotide
gattgacctggaaggcaatagctggtcaacgactgga

SEQ ID NO: 1328 - DNA, 37 bp, Artificial Sequence
  Synthetic oligonucleotide
gcagtacggcacgagggatactctgccctatatatga

SEQ ID NO: 1329 - DNA, 37 bp, Artificial Sequence
  Synthetic oligonucleotide
gccatcatggatatatgcacgtatggtgcttttagga

SEQ ID NO: 1330 - DNA, 38 bp, Artificial Sequence
  Synthetic oligonucleotide
tgcgaaactctagatgattatgattaaacttgtactga

SEQ ID NO: 1331 - DNA, 37 bp, Artificial Sequence
  Synthetic oligonucleotide
aactgaccccattgggtcacccgtgatagttatcgga

SEQ ID NO: 1332 - DNA, 38 bp, Artificial Sequence
  Synthetic oligonucleotide
gtactgctctaggagaaaataaccgtatgaaacgatga

SEQ ID NO: 1333 - DNA, 38 bp, Artificial Sequence
  Synthetic oligonucleotide
ttgcgtatttgccttagaacgcaataaagcatttgtga

SEQ ID NO: 1334 - DNA, 38 bp, Artificial Sequence
  Synthetic oligonucleotide
atctacactggaactgacagggggtagtagtatcctga

SEQ ID NO: 1335 - DNA, 38 bp, Artificial Sequence
  Synthetic oligonucleotide
tagggattgaatctcctctaacattcgacaacaggtga

SEQ ID NO: 1336 - DNA, 38 bp, Artificial Sequence
  Synthetic oligonucleotide
agcgttcaacgcggttgagtgggtgccgaactatatga

SEQ ID NO: 1337 - DNA, 38 bp, Artificial Sequence
  Synthetic oligonucleotide
ggacctgatgccatttagtgtggataatgttattgtga

SEQ ID NO: 1338 - DNA, 35 bp, Artificial Sequence
  Synthetic oligonucleotide
tgatatctaggaaccatgcggtaatggtccgagta

SEQ ID NO: 1339 - DNA, 37 bp, Artificial Sequence
  Synthetic oligonucleotide
tgaaagccgtgactggtattaacggcaaataacggga

SEQ ID NO: 1340 - DNA, 36 bp, Artificial Sequence
  Synthetic oligonucleotide
tgcatgatacgggcttcaaggagcttcttattcgta

SEQ ID NO: 1341 - DNA, 37 bp, Artificial Sequence
  Synthetic oligonucleotide
agacacattgtgtgcaacatggaagtggtctttagga

SEQ ID NO: 1342 - DNA, 38 bp, Artificial Sequence
  Synthetic oligonucleotide
gagttgctctatgtacttcctgagggggtatgtgatga

SEQ ID NO: 1343 - DNA, 37 bp, Artificial Sequence
  Synthetic oligonucleotide
cctgttatctatacttgcgtgagcaaattactttaga

SEQ ID NO: 1344 - DNA, 38 bp, Artificial Sequence
  Synthetic oligonucleotide
tggagtacgcgtgcgttacagtccgaataaggctttga

SEQ ID NO: 1345 - DNA, 38 bp, Artificial Sequence
  Synthetic oligonucleotide
cacagtcaggcgtaatgagaatgagcactttggtttga

SEQ ID NO: 1346 - DNA, 36 bp, Artificial Sequence
  Synthetic oligonucleotide
tcatttacgtgagtaacctggcttagtatcggagta

SEQ ID NO: 1347 - DNA, 38 bp, Artificial Sequence
  Synthetic oligonucleotide
gatggaacgtagcgaaaccgggtttacgcgtgatctga

SEQ ID NO: 1348 - DNA, 37 bp, Artificial Sequence
  Synthetic oligonucleotide
taattatcgtcgtgagatcgatactacggttgtgcga

SEQ ID NO: 1349 - DNA, 35 bp, Artificial Sequence
  Synthetic oligonucleotide
gaggactggcattaccgtggtcagctaaactagac

SEQ ID NO: 1350 - DNA, 37 bp, Artificial Sequence
  Synthetic oligonucleotide
tgcagcatacctaattgttcaccgttgggaaaggtga

SEQ ID NO: 1351 - DNA, 36 bp, Artificial Sequence
  Synthetic oligonucleotide
agctttgtaatacgtgagtttgggtaggtcatcgta

SEQ ID NO: 1352 - DNA, 35 bp, Artificial Sequence
  Synthetic oligonucleotide
cctgcgtcctaaacggataacgaaaacgaatactc

SEQ ID NO: 1353 - DNA, 35 bp, Artificial Sequence
  Synthetic oligonucleotide
ccctgcacgaacgaaccggaataaatcgatggtga

SEQ ID NO: 1354 - DNA, 36 bp, Artificial Sequence
  Synthetic oligonucleotide
gcgcttttctcaaccgacgaccatcgaatagaagaa

SEQ ID NO: 1355 - DNA, 36 bp, Artificial Sequence
  Synthetic oligonucleotide
ttaggctaaggaacgggacccattcgatgaaaatca

SEQ ID NO: 1356 - DNA, 36 bp, Artificial Sequence
  Synthetic oligonucleotide
tcggagtttgcaatccggcaattattagattacaca

SEQ ID NO: 1357 - DNA, 35 bp, Artificial Sequence
  Synthetic oligonucleotide
accggaaatgaaccgtcgcttattccacgaattag

SEQ ID NO: 1358 - DNA, 35 bp, Artificial Sequence
  Synthetic oligonucleotide
gagaattgcggtaaatttcggggcaatatcctctc

SEQ ID NO: 1359 - DNA, 36 bp, Artificial Sequence
  Synthetic oligonucleotide
acgccccgaatgatcggtgggctgtattttacaata

SEQ ID NO: 1360 - DNA, 37 bp, Artificial Sequence
  Synthetic oligonucleotide
gagtagtgggctcacgggggcagtatatcggatacga

SEQ ID NO: 1361 - DNA, 36 bp, Artificial Sequence
  Synthetic oligonucleotide
gagtgcgatggcgtccacggggatttttcggaataa

SEQ ID NO: 1362 - DNA, 36 bp, Artificial Sequence
  Synthetic oligonucleotide
accacgtacaaggaagttaggattcggggaccgtga

SEQ ID NO: 1363 - DNA, 35 bp, Artificial Sequence
  Synthetic oligonucleotide
gaaagctcaagctaatgagaatacgatcatacacc

SEQ ID NO: 1364 - DNA, 36 bp, Artificial Sequence
  Synthetic oligonucleotide
aggacgacgaatttactctaggggtgggctggttaa

SEQ ID NO: 1365 - DNA, 37 bp, Artificial Sequence
  Synthetic oligonucleotide
gtacactggtgtgattgttgtggtggagttggtaaga

SEQ ID NO: 1366 - DNA, 36 bp, Artificial Sequence
  Synthetic oligonucleotide
gggtagtacggggagcactgggctagattgtgacta

SEQ ID NO: 1367 - DNA, 35 bp, Artificial Sequence
  Synthetic oligonucleotide
ggtggaacgggggttgggattgtaagggagtatgt

SEQ ID NO: 1368 - DNA, 37 bp, Artificial Sequence
  Synthetic oligonucleotide
acggtaaaaagggcaatgcttggcgtctatcagacga

SEQ ID NO: 1369 - DNA, 35 bp, Artificial Sequence
  Synthetic oligonucleotide
gtgtggaccggctagtaaaggctgttggggtaatt

SEQ ID NO: 1370 - DNA, 35 bp, Artificial Sequence
  Synthetic oligonucleotide
gcctatcggtggatagtttggtcattcattggagc

SEQ ID NO: 1371 - DNA, 37 bp, Artificial Sequence
  Synthetic oligonucleotide
actctccatgggtggggctcccgaaagaatttctaga

SEQ ID NO: 1372 - DNA, 37 bp, Artificial Sequence
  Synthetic oligonucleotide
ttaaagccatcaaaatctatctaaagttgtagaagga

SEQ ID NO: 1373 - DNA, 37 bp, Artificial Sequence
  Synthetic oligonucleotide
gtctacataatttgtatacggtttaaaatctcgagga

SEQ ID NO: 1374 - DNA, 38 bp, Artificial Sequence
  Synthetic oligonucleotide
tctcggagtagaatccaccagaatcacaggaattctga

SEQ ID NO: 1375 - DNA, 35 bp, Artificial Sequence
  Synthetic oligonucleotide
gaaaggtgccaatcgccggtacacaatttaggaaa

SEQ ID NO: 1376 - DNA, 35 bp, Artificial Sequence
  Synthetic oligonucleotide
cataaacaccttatgaatttatgtagaaatcgaaa

SEQ ID NO: 1377 - DNA, 34 bp, Artificial Sequence
  Synthetic oligonucleotide
gaaccgaagtagtagatttaattatacataatgt

SEQ ID NO: 1378 - DNA, 36 bp, Artificial Sequence
  Synthetic oligonucleotide
gccgcaatacaaacgagaggcttctcccgattaata

SEQ ID NO: 1379 - DNA, 35 bp, Artificial Sequence
  Synthetic oligonucleotide
acctgcggaatatcgtgagaattgaaaaaagcaaa

SEQ ID NO: 1380 - DNA, 38 bp, Artificial Sequence
  Synthetic oligonucleotide
taggcgaatcgaaaaaaagtaatcattatgggttgtga

SEQ ID NO: 1381 - DNA, 37 bp, Artificial Sequence
  Synthetic oligonucleotide
ataccggaccaaggacgccggggtactaaggactcga

SEQ ID NO: 1382 - DNA, 37 bp, Artificial Sequence
  Synthetic oligonucleotide
cgcataatagtcgacgtttttttttgtcggattcgga

SEQ ID NO: 1383 - DNA, 38 bp, Artificial Sequence
  Synthetic oligonucleotide
acaggaaggccaaagtttttccaaggtcgattgcctga

SEQ ID NO: 1384 - DNA, 36 bp, Artificial Sequence
  Synthetic oligonucleotide
gaaatcgtttggtaatttagttcggaacccagggta

SEQ ID NO: 1385 - DNA, 35 bp, Artificial Sequence
  Synthetic oligonucleotide
aaaacgtctcatgcggcctttcgagggcatatctc

SEQ ID NO: 1386 - DNA, 38 bp, Artificial Sequence
  Synthetic oligonucleotide
aaggttcgagaattctcactgcagatcatccgtcatga

SEQ ID NO: 1387 - DNA, 35 bp, Artificial Sequence
  Synthetic oligonucleotide
agtgctctctcttgggggtagtcatccagaatagt

SEQ ID NO: 1388 - DNA, 35 bp, Artificial Sequence
  Synthetic oligonucleotide
taagtcccaatttatttgaagacgttgtaatcgtc

SEQ ID NO: 1389 - DNA, 36 bp, Artificial Sequence
  Synthetic oligonucleotide
aaaacaggctaaaaaggtacatccccattttgctta

SEQ ID NO: 1390 - DNA, 37 bp, Artificial Sequence
  Synthetic oligonucleotide
gtgcgcaaggtttagcgcatacgtagttgaataccga

SEQ ID NO: 1391 - DNA, 37 bp, Artificial Sequence
  Synthetic oligonucleotide
ttccaagtacccaggtttagacctgggacgatagcga

SEQ ID NO: 1392 - DNA, 35 bp, Artificial Sequence
  Synthetic oligonucleotide
tttccaccaaccctgatttgaaaaagacacgcaaa

SEQ ID NO: 1393 - DNA, 35 bp, Artificial Sequence
  Synthetic oligonucleotide
ctccgcccaacgagagttctacgtaaagatcaaac

SEQ ID NO: 1394 - DNA, 37 bp, Artificial Sequence
  Synthetic oligonucleotide
tgtcccgcgcttgacatcatcctaagattaaagaaga

SEQ ID NO: 1395 - DNA, 35 bp, Artificial Sequence
  Synthetic oligonucleotide
attaccgttaatttaaagtacccacgggttgttgg

SEQ ID NO: 1396 - DNA, 37 bp, Artificial Sequence
  Synthetic oligonucleotide
gcatcgtggaaagattctcttataatcaattggggga

SEQ ID NO: 1397 - DNA, 35 bp, Artificial Sequence
  Synthetic oligonucleotide
acacacacggggtagatcacataggcaaacgcttg

SEQ ID NO: 1398 - DNA, 36 bp, Artificial Sequence
  Synthetic oligonucleotide
acaaacgtactaagggcgaagccttttactcgcgca

SEQ ID NO: 1399 - DNA, 38 bp, Artificial Sequence
  Synthetic oligonucleotide
cgtgcaaaccgctgtaagcattcaaaccaactggatga

SEQ ID NO: 1400 - DNA, 35 bp, Artificial Sequence
  Synthetic oligonucleotide
acacaaacacaatctaggagttaaatacagttgga

SEQ ID NO: 1401 - DNA, 35 bp, Artificial Sequence
  Synthetic oligonucleotide
actttcacgatgttgggggggcccaattacagatg

SEQ ID NO: 1402 - DNA, 35 bp, Artificial Sequence
  Synthetic oligonucleotide
acgtttagattaagttcgcttatgaatgtgggatt

SEQ ID NO: 1403 - DNA, 37 bp, Artificial Sequence
  Synthetic oligonucleotide
attgccgttgatgttcgtgattttattaagtggggga

SEQ ID NO: 1404 - DNA, 37 bp, Artificial Sequence
  Synthetic oligonucleotide
gttcttaggcctgttgttaccaggattttcgtgtaga

SEQ ID NO: 1405 - DNA, 36 bp, Artificial Sequence
  Synthetic oligonucleotide
agtccggatacctgtttgtatgcgaaagggaattta

SEQ ID NO: 1406 - DNA, 35 bp, Artificial Sequence
  Synthetic oligonucleotide
gttaatgtcaatctgaaccgacgtgagtattcggc

SEQ ID NO: 1407 - DNA, 37 bp, Artificial Sequence
  Synthetic oligonucleotide
accacggttgggttgcggctaacgtatagccgatgga

SEQ ID NO: 1408 - DNA, 36 bp, Artificial Sequence
  Synthetic oligonucleotide
gtgccttggttgtaattggactttatggctacctaa

SEQ ID NO: 1409 - DNA, 38 bp, Artificial Sequence
  Synthetic oligonucleotide
gatttgcgagtgtgaaacgaattatagcacacgtctga

SEQ ID NO: 1410 - DNA, 35 bp, Artificial Sequence
  Synthetic oligonucleotide
atgctggtgaaccaaactcaagcatgacatttaag

SEQ ID NO: 1411 - DNA, 36 bp, Artificial Sequence
  Synthetic oligonucleotide
cctgcccacgaattgtatatgtaattgcactatcga

SEQ ID NO: 1412 - DNA, 35 bp, Artificial Sequence
  Synthetic oligonucleotide
tctgcaggacttttgattcgtgggttcaacctcat

SEQ ID NO: 1413 - DNA, 37 bp, Artificial Sequence
  Synthetic oligonucleotide
gcacattatgtcacgtagaggcacagtcggtaatcga

SEQ ID NO: 1414 - DNA, 36 bp, Artificial Sequence
  Synthetic oligonucleotide
gggctacgttatcccattcaattcgaattaaatgta

SEQ ID NO: 1415 - DNA, 36 bp, Artificial Sequence
  Synthetic oligonucleotide
acattgccgaattaattcgttgtcgaggaaagacaa

SEQ ID NO: 1416 - DNA, 35 bp, Artificial Sequence
  Synthetic oligonucleotide
cccacgtgttacgggttttatcatgacatcactat

SEQ ID NO: 1417 - DNA, 35 bp, Artificial Sequence
  Synthetic oligonucleotide
catgcacgttttattgtggaaatgtaagcttgggc

SEQ ID NO: 1418 - DNA, 37 bp, Artificial Sequence
  Synthetic oligonucleotide
tgcaagggaaatacgttcctgtgttgtttcgatgaga

SEQ ID NO: 1419 - DNA, 35 bp, Artificial Sequence
  Synthetic oligonucleotide
tgggcagtctctatttgtcattacggttttatgtc

SEQ ID NO: 1420 - DNA, 38 bp, Artificial Sequence
  Synthetic oligonucleotide
agcaggcaacagtatcagccctatttgtcgtaaaatga

SEQ ID NO: 1421 - DNA, 38 bp, Artificial Sequence
  Synthetic oligonucleotide
ggctacgggaaagatgtcacgtctgtttcatttgatga

SEQ ID NO: 1422 - DNA, 35 bp, Artificial Sequence
  Synthetic oligonucleotide
actacgttttaatttcagtaacccatccgatgctc

SEQ ID NO: 1423 - DNA, 36 bp, Artificial Sequence
  Synthetic oligonucleotide
aacaaacgccaaccatatggtaggattcctctttta

SEQ ID NO: 1424 - DNA, 36 bp, Artificial Sequence
  Synthetic oligonucleotide
tgataaccatcggtacctcaccgctcccaactctta

SEQ ID NO: 1425 - DNA, 36 bp, Artificial Sequence
  Synthetic oligonucleotide
cgaaccgacgaaatttccacaccgctttgtatgtta

SEQ ID NO: 1426 - DNA, 35 bp, Artificial Sequence
  Synthetic oligonucleotide
tacctcatgtttgtcactatggaaatcatcccgac

SEQ ID NO: 1427 - DNA, 36 bp, Artificial Sequence
  Synthetic oligonucleotide
agttatttctcgccacataacactctatggaaacta

SEQ ID NO: 1428 - DNA, 36 bp, Artificial Sequence
  Synthetic oligonucleotide
atctcggatttcccgtaggtcactggcacatttcta

SEQ ID NO: 1429 - DNA, 37 bp, Artificial Sequence
  Synthetic oligonucleotide
aattttccgctgggacgaatttctaaccctatttgga

SEQ ID NO: 1430 - DNA, 35 bp, Artificial Sequence
  Synthetic oligonucleotide
gaagcaccgaatcacctggcatggccctttatcta

SEQ ID NO: 1431 - DNA, 35 bp, Artificial Sequence
  Synthetic oligonucleotide
actgccgacgcacaacttgggtggggctctaattt

SEQ ID NO: 1432 - DNA, 35 bp, Artificial Sequence
  Synthetic oligonucleotide
ttcgctgacctcaccggacatatcatttaaagcta

SEQ ID NO: 1433 - DNA, 35 bp, Artificial Sequence
  Synthetic oligonucleotide
tcccttattatgcgaaacaaatatgtagttcttac

SEQ ID NO: 1434 - DNA, 35 bp, Artificial Sequence
  Synthetic oligonucleotide
tctaaaactcacgctaggtggtacaaccgattcta

SEQ ID NO: 1435 - DNA, 36 bp, Artificial Sequence
  Synthetic oligonucleotide
gtagccaacgaagctcgcgtattctatttgccctta

SEQ ID NO: 1436 - DNA, 36 bp, Artificial Sequence
  Synthetic oligonucleotide
acctcaccaagtccttaaggattctgtattcataaa

SEQ ID NO: 1437 - DNA, 35 bp, Artificial Sequence
  Synthetic oligonucleotide
agaatctggctattgatccccacacattgcgaaaa

SEQ ID NO: 1438 - DNA, 35 bp, Artificial Sequence
  Synthetic oligonucleotide
acctaccaatctagatccgcttttatggattgctc

SEQ ID NO: 1439 - DNA, 35 bp, Artificial Sequence
  Synthetic oligonucleotide
gacttctaaacacatggggtgcccgcaacatattt

SEQ ID NO: 1440 - DNA, 38 bp, Artificial Sequence
  Synthetic oligonucleotide
tccagaacgtcagctctccatacgcaattaattcatga

SEQ ID NO: 1441 - DNA, 35 bp, Artificial Sequence
  Synthetic oligonucleotide
gacggccttataaggcactcctcattcatttaata

SEQ ID NO: 1442 - DNA, 38 bp, Artificial Sequence
  Synthetic oligonucleotide
gggacctgcaagcctatcaacgggttatacatttgtga

SEQ ID NO: 1443 - DNA, 36 bp, Artificial Sequence
  Synthetic oligonucleotide
tacacttccatttgatgcgctcaccttgaatctgta

SEQ ID NO: 1444 - DNA, 36 bp, Artificial Sequence
  Synthetic oligonucleotide
aatcgaactcattactttccaatggacctgggagaa

SEQ ID NO: 1445 - DNA, 36 bp, Artificial Sequence
  Synthetic oligonucleotide
agtttacgagttacactacaacggacgaatctttta

SEQ ID NO: 1446 - DNA, 35 bp, Artificial Sequence
  Synthetic oligonucleotide
aacttttctggctttatacacatacggttgccatt

SEQ ID NO: 1447 - DNA, 36 bp, Artificial Sequence
  Synthetic oligonucleotide
agaactgggccttggaatcacacacctaactagtta

SEQ ID NO: 1448 - DNA, 36 bp, Artificial Sequence
  Synthetic oligonucleotide
attcgcactaataacatgttgctccattcaacctaa

SEQ ID NO: 1449 - DNA, 35 bp, Artificial Sequence
  Synthetic oligonucleotide
tatctgctgttttctctggtgccaataactacatc

SEQ ID NO: 1450 - DNA, 37 bp, Artificial Sequence
  Synthetic oligonucleotide
ttgcacataattttctgctttaaccaagcgaacccga

SEQ ID NO: 1451 - DNA, 35 bp, Artificial Sequence
  Synthetic oligonucleotide
taaaattctgaaaatacacgtgtctttcgcattac

SEQ ID NO: 1452 - DNA, 35 bp, Artificial Sequence
  Synthetic oligonucleotide
tcccgaacacatcccccttttaagggctttgctaa

SEQ ID NO: 1453 - DNA, 38 bp, Artificial Sequence
  Synthetic oligonucleotide
aaccacacggggctctcatcgatacttctagtgattga

SEQ ID NO: 1454 - DNA, 35 bp, Artificial Sequence
  Synthetic oligonucleotide
atctagaattccgtttgcgcgagtaacttccctgt

SEQ ID NO: 1455 - DNA, 36 bp, Artificial Sequence
  Synthetic oligonucleotide
cccgcttatcgctagtacctcatttagaattggaaa

SEQ ID NO: 1456 - DNA, 36 bp, Artificial Sequence
  Synthetic oligonucleotide
acctgtaaatttggctcacttttcctttacactgga

SEQ ID NO: 1457 - DNA, 35 bp, Artificial Sequence
  Synthetic oligonucleotide
aatagtatcacacctatctggcttcctgtacccgt

SEQ ID NO: 1458 - DNA, 38 bp, Artificial Sequence
  Synthetic oligonucleotide
acccacccttgagcaccattaaatagtgatttcgctga

SEQ ID NO: 1459 - DNA, 37 bp, Artificial Sequence
  Synthetic oligonucleotide
tcacgaaccctttagctctattttgtttgacgcatga

SEQ ID NO: 1460 - DNA, 37 bp, Artificial Sequence
  Synthetic oligonucleotide
gaggaacgtttctcccctcaacatttaaataaacaga

SEQ ID NO: 1461 - DNA, 35 bp, Artificial Sequence
  Synthetic oligonucleotide
atcctacgcataattctcgaggatctatttcgaaa

SEQ ID NO: 1462 - DNA, 36 bp, Artificial Sequence
  Synthetic oligonucleotide
tgcccgcaattacccctagatccacagcttggttta

SEQ ID NO: 1463 - DNA, 38 bp, Artificial Sequence
  Synthetic oligonucleotide
ggctcttatacaaaacattgggttctcgacctccctga

SEQ ID NO: 1464 - DNA, 36 bp, Artificial Sequence
  Synthetic oligonucleotide
gtgagctgctaatatttatcctgaacttgcttacga

SEQ ID NO: 1465 - DNA, 35 bp, Artificial Sequence
  Synthetic oligonucleotide
agttaccttacaacgaggtttcttgaatggattct

SEQ ID NO: 1466 - DNA, 35 bp, Artificial Sequence
  Synthetic oligonucleotide
ttacaccatccctacgcggtaatagcaactctgtt

SEQ ID NO: 1467 - DNA, 36 bp, Artificial Sequence
  Synthetic oligonucleotide
gcaccacgcacctgtggggattccctaatgtcttta

SEQ ID NO: 1468 - DNA, 35 bp, Artificial Sequence
  Synthetic oligonucleotide
ctatcggactaatacacgtaaaaataactctggtt

SEQ ID NO: 1469 - DNA, 35 bp, Artificial Sequence
  Synthetic oligonucleotide
ggcgtacttatcacaaacggtggaaccacacttct

SEQ ID NO: 1470 - DNA, 37 bp, Artificial Sequence
  Synthetic oligonucleotide
tattcttatccaacccacgaaatcaattgtattttga

SEQ ID NO: 1471 - DNA, 35 bp, Artificial Sequence
  Synthetic oligonucleotide
agatccgaatccgtaactccaaaatatttatgcac

SEQ ID NO: 1472 - DNA, 38 bp, Artificial Sequence
  Synthetic oligonucleotide
actatagaacaatccaccgctttaaatcaactatctta

SEQ ID NO: 1473 - DNA, 35 bp, Artificial Sequence
  Synthetic oligonucleotide
gccgttcttctgcgacgaacacatcctcccttaat

SEQ ID NO: 1474 - DNA, 35 bp, Artificial Sequence
  Synthetic oligonucleotide
gcgcgaggcccgcgggctcatcacttttgttatct

SEQ ID NO: 1475 - DNA, 38 bp, Artificial Sequence
  Synthetic oligonucleotide
tacccctgacaatcctcgcgccgaggcctccatcctga

SEQ ID NO: 1476 - DNA, 36 bp, Artificial Sequence
  Synthetic oligonucleotide
ttcggtctaatttttagcggccaaattttcttatca

SEQ ID NO: 1477 - DNA, 36 bp, Artificial Sequence
  Synthetic oligonucleotide
gattttaaaacccttgcacctgattgtgccaatcca

SEQ ID NO: 1478 - DNA, 35 bp, Artificial Sequence
  Synthetic oligonucleotide
gcgcgaggcccgcgggctcatcacttttgttatat

SEQ ID NO: 1479 - DNA, 35 bp, Artificial Sequence
  Synthetic oligonucleotide
gccgttcttctgcgacgaacacatcctcccttact

SEQ ID NO: 1480 - DNA, 36 bp, Artificial Sequence
  Synthetic oligonucleotide
tgctcggccctattaacacgtgccgtgtcttgttca

SEQ ID NO: 1481 - DNA, 38 bp, Artificial Sequence
  Synthetic oligonucleotide
tcgcgccgaccgtattacaccaactctatggactctaa

SEQ ID NO: 1482 - DNA, 36 bp, Artificial Sequence
  Synthetic oligonucleotide
aacccaattcacatacactctcacccccactaaaca

SEQ ID NO: 1483 - DNA, 35 bp, Artificial Sequence
  Synthetic oligonucleotide
gccgttcttctgcgacgaacacatcctcccttatt

SEQ ID NO: 1484 - DNA, 35 bp, Artificial Sequence
  Synthetic oligonucleotide
gcgcgaggcccgcgggctcatcacttttgttatgt

SEQ ID NO: 1485 - DNA, 38 bp, Artificial Sequence
  Synthetic oligonucleotide
tacccctgacaatcctcgcgccgaggcctccatcctca

SEQ ID NO: 1486 - DNA, 36 bp, Artificial Sequence
  Synthetic oligonucleotide
ttccgcgcaaacgaatgactctttgttgaaaaacga

SEQ ID NO: 1487 - DNA, 36 bp, Artificial Sequence
  Synthetic oligonucleotide
gcgtagtggctgcttggcgtttccgcatactaggca

SEQ ID NO: 1488 - DNA, 37 bp, Artificial Sequence
  Synthetic oligonucleotide
aaacctcggctaaccgccaagggtagtgtcccccgca

SEQ ID NO: 1489 - DNA, 38 bp, Artificial Sequence
  Synthetic oligonucleotide
atgagacgtagcaacactcgagacccttggagcactca

SEQ ID NO: 1490 - DNA, 36 bp, Artificial Sequence
  Synthetic oligonucleotide
agctgccagggttcgggaccttaacggatgtcccaa

SEQ ID NO: 1491 - DNA, 37 bp, Artificial Sequence
  Synthetic oligonucleotide
tcacgagcttccactacgtctatccgcgtagacggaa

SEQ ID NO: 1492 - DNA, 37 bp, Artificial Sequence
  Synthetic oligonucleotide
gatcgacgattcgatcatccaacgtatttacaccaga

SEQ ID NO: 1493 - DNA, 36 bp, Artificial Sequence
  Synthetic oligonucleotide
gcagccggcgaccgggatgtcgtcgggacttgctta

SEQ ID NO: 1494 - DNA, 38 bp, Artificial Sequence
  Synthetic oligonucleotide
atgaaccatggttacacctctaatgtagcctcatgtca

SEQ ID NO: 1495 - DNA, 37 bp, Artificial Sequence
  Synthetic oligonucleotide
ccaccggtacttattattcgccatccacacccagtta

SEQ ID NO: 1496 - DNA, 35 bp, Artificial Sequence
  Synthetic oligonucleotide
tagttacgccactactctgtgggagaaacccgaga

SEQ ID NO: 1497 - DNA, 38 bp, Artificial Sequence
  Synthetic oligonucleotide
atccacccaaaatcgatataagtgcgcccccaatctaa

SEQ ID NO: 1498 - DNA, 35 bp, Artificial Sequence
  Synthetic oligonucleotide
aggggggaaagtcatcgggtggctgtactacttca

SEQ ID NO: 1499 - DNA, 37 bp, Artificial Sequence
  Synthetic oligonucleotide
gggggtcgtactcccgagatttgcgttacggtgaaca

SEQ ID NO: 1500 - DNA, 37 bp, Artificial Sequence
  Synthetic oligonucleotide
gagtatcctctggtcgttcggtacagaaacggtgtaa

SEQ ID NO: 1501 - DNA, 37 bp, Artificial Sequence
  Synthetic oligonucleotide
acatggcctttaaatctacggagtactgttgggggga

SEQ ID NO: 1502 - DNA, 36 bp, Artificial Sequence
  Synthetic oligonucleotide
gcgtagtggctgcttggcgtttccgcatactaggaa

SEQ ID NO: 1503 - DNA, 36 bp, Artificial Sequence
  Synthetic oligonucleotide
tccgataccgaacttcactccgtgggcggggttgaa

SEQ ID NO: 1504 - DNA, 38 bp, Artificial Sequence
  Synthetic oligonucleotide
gcagtgttatttctcttggtttctttgatttcacttaa

SEQ ID NO: 1505 - DNA, 38 bp, Artificial Sequence
  Synthetic oligonucleotide
acatccagatacccttgacttaagattgtgaccactaa

SEQ ID NO: 1506 - DNA, 37 bp, Artificial Sequence
  Synthetic oligonucleotide
acaggttctgcgaccagaaagttaggactaacctaga

SEQ ID NO: 1507 - DNA, 38 bp, Artificial Sequence
  Synthetic oligonucleotide
gcagtgttatttctcttggtttctttgatttcacttca

SEQ ID NO: 1508 - DNA, 37 bp, Artificial Sequence
  Synthetic oligonucleotide
ccgcagttttgttcccgggggaatccggactgaacga

SEQ ID NO: 1509 - DNA, 37 bp, Artificial Sequence
  Synthetic oligonucleotide
aggtccggttcctatggactgcctgaccccgcgaaga

SEQ ID NO: 1510 - DNA, 35 bp, Artificial Sequence
  Synthetic oligonucleotide
ttgtaacgatttgggagtccagagactcgctgttt

SEQ ID NO: 1511 - DNA, 37 bp, Artificial Sequence
  Synthetic oligonucleotide
tttgatttaagtactcccgcgttcctccgaataccca

SEQ ID NO: 1512 - DNA, 38 bp, Artificial Sequence
  Synthetic oligonucleotide
gcagagcgcacgtgtactcaatgggttgttaattttaa

SEQ ID NO: 1513 - DNA, 36 bp, Artificial Sequence
  Synthetic oligonucleotide
gaactctgtattattcctgtcattagccgttggtaa

SEQ ID NO: 1514 - DNA, 38 bp, Artificial Sequence
  Synthetic oligonucleotide
gaggccctaccgtgtattttgataatggatttgtttaa

SEQ ID NO: 1515 - DNA, 38 bp, Artificial Sequence
  Synthetic oligonucleotide
tgtaatcacgggtgcgaactcgagagaatttgtgctaa

SEQ ID NO: 1516 - DNA, 38 bp, Artificial Sequence
  Synthetic oligonucleotide
ggccggtagtccacgctttcgcgagatagtgactgtga

SEQ ID NO: 1517 - DNA, 36 bp, Artificial Sequence
  Synthetic oligonucleotide
aggtcctcagaacttgtgcgtgagcaaagaatgaag

SEQ ID NO: 1518 - DNA, 38 bp, Artificial Sequence
  Synthetic oligonucleotide
gagtatctgggttcgagagcgcatttgcccgctgttga

SEQ ID NO: 1519 - DNA, 35 bp, Artificial Sequence
  Synthetic oligonucleotide
gtattaatcttcgctgtgggagagcgattacgcca

SEQ ID NO: 1520 - DNA, 36 bp, Artificial Sequence
  Synthetic oligonucleotide
tatccttggatcaccgatcgatgcgagaggtagtaa

SEQ ID NO: 1521 - DNA, 38 bp, Artificial Sequence
  Synthetic oligonucleotide
ttttctacgtgacggagagtccagatcgaagacaaaga

SEQ ID NO: 1522 - DNA, 36 bp, Artificial Sequence
  Synthetic oligonucleotide
acaatgcatcgtagcgggtctcggagctcgccttaa

SEQ ID NO: 1523 - DNA, 37 bp, Artificial Sequence
  Synthetic oligonucleotide
tacaaagaacggaagctattcaaaaacacacggagga

SEQ ID NO: 1524 - DNA, 35 bp, Artificial Sequence
  Synthetic oligonucleotide
ggacgaccggatatagtaaagtccccggcttctgt

SEQ ID NO: 1525 - DNA, 37 bp, Artificial Sequence
  Synthetic oligonucleotide
agccatcatgttggcacggtcctttgataccattgga

SEQ ID NO: 1526 - DNA, 36 bp, Artificial Sequence
  Synthetic oligonucleotide
attaccgtcaacgggtcctgggctccatacgaggca

SEQ ID NO: 1527 - DNA, 35 bp, Artificial Sequence
  Synthetic oligonucleotide
ctgctttaggtgtggtcgcactcaaatgtgaatgg

SEQ ID NO: 1528 - DNA, 36 bp, Artificial Sequence
  Synthetic oligonucleotide
gcggggtaagaactcgatgaggtgagtggatttgta

SEQ ID NO: 1529 - DNA, 35 bp, Artificial Sequence
  Synthetic oligonucleotide
aagggattggaacttggatgttttcagttggcgca

SEQ ID NO: 1530 - DNA, 38 bp, Artificial Sequence
  Synthetic oligonucleotide
tgcctcggctagcatcacaatagatggtttgcacttga

SEQ ID NO: 1531 - DNA, 38 bp, Artificial Sequence
  Synthetic oligonucleotide
gagacgaaggcaccttttcgacgcgataagctcgttga

SEQ ID NO: 1532 - DNA, 36 bp, Artificial Sequence
  Synthetic oligonucleotide
accgcgaggtcttttggaacagggcatatgaatcca

SEQ ID NO: 1533 - DNA, 37 bp, Artificial Sequence
  Synthetic oligonucleotide
acgtgaaactaccgagcggtgcttttcgctgtagcga

SEQ ID NO: 1534 - DNA, 37 bp, Artificial Sequence
  Synthetic oligonucleotide
caacgcctgactactgtagagtgaacgctggtggtga

SEQ ID NO: 1535 - DNA, 38 bp, Artificial Sequence
  Synthetic oligonucleotide
gcgaaggtttgggtaaaaggaaatagactttgttgtga

SEQ ID NO: 1536 - DNA, 36 bp, Artificial Sequence
  Synthetic oligonucleotide
acaagtcgctgctcagcttcctagggcagtactcaa

SEQ ID NO: 1537 - DNA, 36 bp, Artificial Sequence
  Synthetic oligonucleotide
aaacgggatctgtcgcgagtacagtgttgcccagta

SEQ ID NO: 1538 - DNA, 36 bp, Artificial Sequence
  Synthetic oligonucleotide
taaaggaacagcgattcgggctgttattttaggtga

SEQ ID NO: 1539 - DNA, 36 bp, Artificial Sequence
  Synthetic oligonucleotide
tgtgggattattgtagttgtagtaaggtgaccggca

SEQ ID NO: 1540 - DNA, 36 bp, Artificial Sequence
  Synthetic oligonucleotide
cgctaaccggaactaggttgcaaagctatggtggta

SEQ ID NO: 1541 - DNA, 36 bp, Artificial Sequence
  Synthetic oligonucleotide
cccttaggttccagtgaagttatgcaacttcatgta

SEQ ID NO: 1542 - DNA, 37 bp, Artificial Sequence
  Synthetic oligonucleotide
ctattccagcttttttgatcccgcttttgagagttga

SEQ ID NO: 1543 - DNA, 38 bp, Artificial Sequence
  Synthetic oligonucleotide
acaggacgtgcgcgctaacgttctattagttgtgctga

SEQ ID NO: 1544 - DNA, 36 bp, Artificial Sequence
  Synthetic oligonucleotide
gagtttcgttttatgtgttggctttatttccctcga

SEQ ID NO: 1545 - DNA, 36 bp, Artificial Sequence
  Synthetic oligonucleotide
tggcgttgtagccacgtccctccgctagtagagaaa

SEQ ID NO: 1546 - DNA, 35 bp, Artificial Sequence
  Synthetic oligonucleotide
tcgtagtactggtcttaatttgttgtagtcctaag

SEQ ID NO: 1547 - DNA, 36 bp, Artificial Sequence
  Synthetic oligonucleotide
tccacacgcggcgagctacgcgactaaaatcacgta

SEQ ID NO: 1548 - DNA, 38 bp, Artificial Sequence
  Synthetic oligonucleotide
tatcaaattcggtcgtagtatttgtcgccgtaacgtga

SEQ ID NO: 1549 - DNA, 36 bp, Artificial Sequence
  Synthetic oligonucleotide
gctacgaagtccaaacgtacgcacctgtttggagta

SEQ ID NO: 1550 - DNA, 35 bp, Artificial Sequence
  Synthetic oligonucleotide
tccgggcaccatatctccactgtgcgaatcactat

SEQ ID NO: 1551 - DNA, 35 bp, Artificial Sequence
  Synthetic oligonucleotide
tccgggcaccatatctccactgtgcgaatcactct

SEQ ID NO: 1552 - DNA, 38 bp, Artificial Sequence; identical to SEQ ID NO: 1543
  Synthetic oligonucleotide

SEQ ID NO: 1553 - DNA, 36 bp, Artificial Sequence
  Synthetic oligonucleotide
agcaaacgatgggccatcattcacgcttggtattaa

SEQ ID NO: 1554 - DNA, 38 bp, Artificial Sequence
  Synthetic oligonucleotide
agggacgtgatatttcaatgctgaatatacacacctga

SEQ ID NO: 1555 - DNA, 37 bp, Artificial Sequence
  Synthetic oligonucleotide
agtgattctcacttgttcccggggttcaaagatctga

SEQ ID NO: 1556 - DNA, 36 bp, Artificial Sequence
  Synthetic oligonucleotide
atcaagggaggatttttcggtcggcctagggacaca

SEQ ID NO: 1557 - DNA, 35 bp, Artificial Sequence
  Synthetic oligonucleotide
atacgcggcctaataataagatcgtcataccccaa

SEQ ID NO: 1558 - DNA, 35 bp, Artificial Sequence
  Synthetic oligonucleotide
atctcacgataaagctaacggtgagagtatctact

SEQ ID NO: 1559 - DNA, 37 bp, Artificial Sequence
  Synthetic oligonucleotide
ccgccggcgatgggggatcgcttattttattgttcga

SEQ ID NO: 1560 - DNA, 36 bp, Artificial Sequence
  Synthetic oligonucleotide
cgggtacgttggatcgacaccgaccatcttgacgta

SEQ ID NO: 1561 - DNA, 36 bp, Artificial Sequence; identical to SEQ ID NO: 1540
  Synthetic oligonucleotide

SEQ ID NO: 1562 - DNA, 38 bp, Artificial Sequence
  Synthetic oligonucleotide
cgagtgctgcgcgggttccttggggtgctccaatttga

SEQ ID NO: 1563 - DNA, 35 bp, Artificial Sequence
  Synthetic oligonucleotide
cgtgtaacccgcccaattccatcgtcacgaaattt

SEQ ID NO: 1564 - DNA, 37 bp, Artificial Sequence; identical to SEQ ID NO: 1542
  Synthetic oligonucleotide

SEQ ID NO: 1565 - DNA, 38 bp, Artificial Sequence
  Synthetic oligonucleotide
cctcgaacctgcgcgggagaaggcgcttgctaatctga

SEQ ID NO: 1566 - DNA, 38 bp, Artificial Sequence
  Synthetic oligonucleotide
cttggtccctgctcggttgaatgacgcaatgagtgtga

SEQ ID NO: 1567 - DNA, 38 bp, Artificial Sequence
  Synthetic oligonucleotide
ctcgtaggactgaggtcgatagttatttcacaccgtga

SEQ ID NO: 1568 - DNA, 38 bp, Artificial Sequence
  Synthetic oligonucleotide
gacacgacgtatctccttattccctgctataagtttga

SEQ ID NO: 1569 - DNA, 36 bp, Artificial Sequence
  Synthetic oligonucleotide
gacgttcttgcaccgcgaggtctgcagcaattctaa

SEQ ID NO: 1570 - DNA, 35 bp, Artificial Sequence
  Synthetic oligonucleotide
gcaactattgggccgtattcgtccacggggcttgt

SEQ ID NO: 1571 - DNA, 38 bp, Artificial Sequence
  Synthetic oligonucleotide
gcgtagggttggttatgcatcaattttccgctaattga

SEQ ID NO: 1572 - DNA, 36 bp, Artificial Sequence
  Synthetic oligonucleotide
gccttcggggtttattaagttattacggatctagta

SEQ ID NO: 1573 - DNA, 37 bp, Artificial Sequence
  Synthetic oligonucleotide
gcgcgtgagctgcaccgacatcacgccgattctctga

SEQ ID NO: 1574 - DNA, 36 bp, Artificial Sequence; identical to SEQ ID NO: 1549
  Synthetic oligonucleotide

SEQ ID NO: 1575 - DNA, 36 bp, Artificial Sequence
  Synthetic oligonucleotide
ggtcactcgtaggtctcccgcatcgagaaagccgta

SEQ ID NO: 1576 - DNA, 38 bp, Artificial Sequence
  Synthetic oligonucleotide
gtggatggcactaatatccccttctcgttaaagtgtga

SEQ ID NO: 1577 - DNA, 35 bp, Artificial Sequence
  Synthetic oligonucleotide
gtccaccgggattcgtatgggtatttttacccacc

SEQ ID NO: 1578 - DNA, 38 bp, Artificial Sequence
  Synthetic oligonucleotide
gttacggtatgcgaggtctcacgttgcgatcattttga

SEQ ID NO: 1579 - DNA, 37 bp, Artificial Sequence
  Synthetic oligonucleotide
gttcatcgttcctatgtcactatttccctactgctga

SEQ ID NO: 1580 - DNA, 37 bp, Artificial Sequence
  Synthetic oligonucleotide
tactaggggccgtgagccttgtgccccaagtagccga

SEQ ID NO: 1581 - DNA, 38 bp, Artificial Sequence; identical to SEQ ID NO: 1548
  Synthetic oligonucleotide

SEQ ID NO: 1582 - DNA, 36 bp, Artificial Sequence; identical to SEQ ID NO: 1547
  Synthetic oligonucleotide

SEQ ID NO: 1583 - DNA, 35 bp, Artificial Sequence; identical to SEQ ID NO: 1546
  Synthetic oligonucleotide

SEQ ID NO: 1584 - DNA, 37 bp, Artificial Sequence
  Synthetic oligonucleotide
tcgtgcgctcggttctacgccactgtacgagacacga

SEQ ID NO: 1585 - DNA, 35 bp, Artificial Sequence
  Synthetic oligonucleotide
tgtacgaaccgggcctaggatagttgctacatgta

SEQ ID NO: 1586 - DNA, 36 bp, Artificial Sequence
  Synthetic oligonucleotide
ataatgccagatctttggtttatcttgcgcttggta

SEQ ID NO: 1587 - DNA, 37 bp, Artificial Sequence
  Synthetic oligonucleotide
ccattagctgagtttcggtggacgcatgatagtttga

SEQ ID NO: 1588 - DNA, 35 bp, Artificial Sequence
  Synthetic oligonucleotide
actccatgggccccccggtttggaccccgggttta

SEQ ID NO: 1589 - DNA, 36 bp, Artificial Sequence
  Synthetic oligonucleotide
gaaaatctggcgacttagttttcgtttgatccctta

SEQ ID NO: 1590 - DNA, 36 bp, Artificial Sequence
  Synthetic oligonucleotide
agctcatggacgcactggtggcagtgcgactactaa

SEQ ID NO: 1591 - DNA, 35 bp, Artificial Sequence
  Synthetic oligonucleotide
aggataactggtttttatctctgctaattcactcg

SEQ ID NO: 1592 - DNA, 38 bp, Artificial Sequence
  Synthetic oligonucleotide
cgtggcctgtttggagacgtactgtgtcaggcatttga

SEQ ID NO: 1593 - DNA, 36 bp, Artificial Sequence
  Synthetic oligonucleotide
accttgggatcctgtttagaccgaatcggtgcgcta

SEQ ID NO: 1594 - DNA, 35 bp, Artificial Sequence
  Synthetic oligonucleotide
atcgtagtcatagacccggctttggtttccgggta

SEQ ID NO: 1595 - DNA, 37 bp, Artificial Sequence
  Synthetic oligonucleotide
gacctgggctgtctttactttgtttcgcggggctgga

SEQ ID NO: 1596 - DNA, 38 bp, Artificial Sequence
  Synthetic oligonucleotide
ccttgagccgccgggtttcggtccttattcgtgaatga

SEQ ID NO: 1597 - DNA, 35 bp, Artificial Sequence
  Synthetic oligonucleotide
agatcttttcggttattggggggaaccgagacgta

SEQ ID NO: 1598 - DNA, 36 bp, Artificial Sequence
  Synthetic oligonucleotide
gtgcgttggttaccgatggaggggacccgtagacta

SEQ ID NO: 1599 - DNA, 35 bp, Artificial Sequence
  Synthetic oligonucleotide
ttttattggctcgtttcctataatatgttgaatcc

SEQ ID NO: 1600 - DNA, 35 bp, Artificial Sequence
  Synthetic oligonucleotide
gcctcgacgacagtgacctacatcgctcgtttcgt

SEQ ID NO: 1601 - DNA, 38 bp, Artificial Sequence
  Synthetic oligonucleotide
ggtctggggggattcctacggttccaacagcataatga

SEQ ID NO: 1602 - DNA, 36 bp, Artificial Sequence
  Synthetic oligonucleotide
gttgccttgtaccccatagctggtaaggtcctagta

SEQ ID NO: 1603 - DNA, 36 bp, Artificial Sequence
  Synthetic oligonucleotide
gttgttcgggcgtcgcaacacggtcccattgtctta

SEQ ID NO: 1604 - DNA, 36 bp, Artificial Sequence
  Synthetic oligonucleotide
tcgttatagcctatatacacgcggttgactcgctga

SEQ ID NO: 1605 - DNA, 35 bp, Artificial Sequence
  Synthetic oligonucleotide
ttgtagctgctattgttttctcgattgagaactta

SEQ ID NO: 1606 - DNA, 35 bp, Artificial Sequence
  Synthetic oligonucleotide
ggctcttggtttagcccttattgtttatcattcat

SEQ ID NO: 1607 - DNA, 35 bp, Artificial Sequence
  Synthetic oligonucleotide
taattggcccgtttccaaatttatagattcctaca

SEQ ID NO: 1608 - DNA, 38 bp, Artificial Sequence
  Synthetic oligonucleotide
tccgacccatatcgacgatactggcgtggcgctactga

SEQ ID NO: 1609 - DNA, 38 bp, Artificial Sequence
  Synthetic oligonucleotide
tgcgtgagtaacgcacaggggaacactccgttttgtga

SEQ ID NO: 1610 - DNA, 36 bp, Artificial Sequence
  Synthetic oligonucleotide
gctggtatagctgggtttctatcgtttattctcgta

SEQ ID NO: 1611 - DNA, 36 bp, Artificial Sequence
  Synthetic oligonucleotide
tttgcttcatttgcacttcccccgttattccgctca

SEQ ID NO: 1612 - DNA, 38 bp, Artificial Sequence
  Synthetic oligonucleotide
aatttttactgcgtggaaaggattcgggaatttgttga

SEQ ID NO: 1613 - DNA, 36 bp, Artificial Sequence; identical to SEQ ID NO: 1593
  Synthetic oligonucleotide

SEQ ID NO: 1614 - DNA, 35 bp, Artificial Sequence; identical to SEQ ID NO: 1591
  Synthetic oligonucleotide

SEQ ID NO: 1615 - DNA, 36 bp, Artificial Sequence; identical to SEQ ID NO: 1590
  Synthetic oligonucleotide

SEQ ID NO: 1616 - DNA, 36 bp, Artificial Sequence
  Synthetic oligonucleotide
aggagtacgcgttcatccagacacggaatactttga

SEQ ID NO: 1617 - DNA, 36 bp, Artificial Sequence
  Synthetic oligonucleotide
agccttacgccatgccgagagagcgctttgtttcga

SEQ ID NO: 1618 - DNA, 35 bp, Artificial Sequence
  Synthetic oligonucleotide
agggcttagtttcctgattttactacagctcgctc

SEQ ID NO: 1619 - DNA, 36 bp, Artificial Sequence; identical to SEQ ID NO: 1586
  Synthetic oligonucleotide

SEQ ID NO: 1620 - DNA, 35 bp, Artificial Sequence
  Synthetic oligonucleotide
agtcctgatgctcaatgcgcgagtttcattgagct

SEQ ID NO: 1621 - DNA, 35 bp, Artificial Sequence; identical to SEQ ID NO: 1594
  Synthetic oligonucleotide

SEQ ID NO: 1622 - DNA, 37 bp, Artificial Sequence; identical to SEQ ID NO: 1587
  Synthetic oligonucleotide

SEQ ID NO: 1623 - DNA, 35 bp, Artificial Sequence
  Synthetic oligonucleotide
cgtaagccggtttcagcccacctggagattcttca

SEQ ID NO: 1624 - DNA, 38 bp, Artificial Sequence; identical to SEQ ID NO: 1596
  Synthetic oligonucleotide

SEQ ID NO: 1625 - DNA, 36 bp, Artificial Sequence
  Synthetic oligonucleotide
cgtagttactcgtcatggggtctttgttatgtggta

SEQ ID NO: 1626 - DNA, 36 bp, Artificial Sequence; identical to SEQ ID NO: 1589
  Synthetic oligonucleotide

SEQ ID NO: 1627 - DNA, 37 bp, Artificial Sequence; identical to SEQ ID NO: 1595
  Synthetic oligonucleotide

SEQ ID NO: 1628 - DNA, 37 bp, Artificial Sequence
  Synthetic oligonucleotide
gagtccccttctttgatgctggggtgagctcctccga

SEQ ID NO: 1629 - DNA, 37 bp, Artificial Sequence
  Synthetic oligonucleotide
gatgatcgcgcctttcgtttgtgacggttaccaggga

SEQ ID NO: 1630 - DNA, 35 bp, Artificial Sequence; identical to SEQ ID NO: 1600
  Synthetic oligonucleotide

SEQ ID NO: 1631 - DNA, 38 bp, Artificial Sequence
  Synthetic oligonucleotide
ggcccccgctccctagtttgagcgccctccacgattga

SEQ ID NO: 1632 - DNA, 35 bp, Artificial Sequence; identical to SEQ ID NO: 1606
  Synthetic oligonucleotide

SEQ ID NO: 1633 - DNA, 38 bp, Artificial Sequence; identical to SEQ ID NO: 1601
  Synthetic oligonucleotide

SEQ ID NO: 1634 - DNA, 36 bp, Artificial Sequence; identical to SEQ ID NO: 1602
  Synthetic oligonucleotide

SEQ ID NO: 1635 - DNA, 36 bp, Artificial Sequence; identical to SEQ ID NO: 1603
  Synthetic oligonucleotide

SEQ ID NO: 1636 - DNA, 38 bp, Artificial Sequence
  Synthetic oligonucleotide
tactggggaagctccgggcgcttggtttcgccacctga

SEQ ID NO: 1637 - DNA, 35 bp, Artificial Sequence
  Synthetic oligonucleotide
tcatttcggactgttctaacgcgagttatgaaggg

SEQ ID NO: 1638 - DNA, 36 bp, Artificial Sequence
  Synthetic oligonucleotide
tcacccgacggcaacaagggcatttgcttcatagta

SEQ ID NO: 1639 - DNA, 37 bp, Artificial Sequence
  Synthetic oligonucleotide
tcgaggggaattgtccacatgcatggtttcataagga

SEQ ID NO: 1640 - DNA, 38 bp, Artificial Sequence; identical to SEQ ID NO: 1608
  Synthetic oligonucleotide

SEQ ID NO: 1641 - DNA, 38 bp, Artificial Sequence; identical to SEQ ID NO: 1609
  Synthetic oligonucleotide

SEQ ID NO: 1642 - DNA, 38 bp, Artificial Sequence
  Synthetic oligonucleotide
tgttcttactaggcttagcagcctgttcccgttattga

SEQ ID NO: 1643 - DNA, 37 bp, Artificial Sequence
  Synthetic oligonucleotide
tgttttcagaccagagtaggaattccgagggcggtta

SEQ ID NO: 1644 - DNA, 35 bp, Artificial Sequence
  Synthetic oligonucleotide
tgttttgctgcttagagcgtaatcgtattggctct

SEQ ID NO: 1645 - DNA, 37 bp, Artificial Sequence
  Synthetic oligonucleotide
ttcctaggatgaaacagaaacaccgattggtccagga

SEQ ID NO: 1646 - DNA, 37 bp, Artificial Sequence
  Synthetic oligonucleotide
ttccggttttgggcgactccgtttgcgcccacgctga

SEQ ID NO: 1647 - DNA, 35 bp, Artificial Sequence
  Synthetic oligonucleotide
tttgcaagttcgctacgtatatccactgtgaagcc

SEQ ID NO: 1648 - DNA, 35 bp, Artificial Sequence; identical to SEQ ID NO: 1605
  Synthetic oligonucleotide

SEQ ID NO: 1649 - DNA, 37 bp, Artificial Sequence
  Synthetic oligonucleotide
ttttgttaaacaacgccggcaagggtcgttgttacga

SEQ ID NO: 1650 - DNA, 37 bp, Artificial Sequence
  Synthetic oligonucleotide
ttttcgcattaaaaacgggtgtccaccggttggtgga

SEQ ID NO: 1651 - DNA, 36 bp, Artificial Sequence
  Synthetic oligonucleotide
cgcgcgagcaactacactaacggaaaacccgttcaa

SEQ ID NO: 1652 - DNA, 36 bp, Artificial Sequence
  Synthetic oligonucleotide
ctactcgccgcaacccaacactcagtcaaacgatca

SEQ ID NO: 1653 - DNA, 38 bp, Artificial Sequence
  Synthetic oligonucleotide
ataacgcacgtttccataactcataccactggccttga

SEQ ID NO: 1654 - DNA, 35 bp, Artificial Sequence
  Synthetic oligonucleotide
gagagaagtatttgttaagccacatagttttcttg

SEQ ID NO: 1655 - DNA, 36 bp, Artificial Sequence
  Synthetic oligonucleotide
ccttactgcatggtttggtaccgctattgtccccca

SEQ ID NO: 1656 - DNA, 37 bp, Artificial Sequence
  Synthetic oligonucleotide
aaaattatgcgccttagggaagacatacggcctgtga

SEQ ID NO: 1657 - DNA, 37 bp, Artificial Sequence
  Synthetic oligonucleotide
aatgatcggacttgcaggctcaaccctactgatggga

SEQ ID NO: 1658 - DNA, 35 bp, Artificial Sequence
  Synthetic oligonucleotide
aaggcacgtacacactatcacctggggtgtgcctc

SEQ ID NO: 1659 - DNA, 35 bp, Artificial Sequence
  Synthetic oligonucleotide
aatagattaaagtgaacgtgagtgtttccatatta

SEQ ID NO: 1660 - DNA, 38 bp, Artificial Sequence
  Synthetic oligonucleotide
aattcgtcactcgttgtgtgtagccggtgcccaattga

SEQ ID NO: 1661 - DNA, 36 bp, Artificial Sequence
  Synthetic oligonucleotide
acgggagatcctttaagtacgtcgaagccagcaata

SEQ ID NO: 1662 - DNA, 37 bp, Artificial Sequence
  Synthetic oligonucleotide
actccgttacgtgttggcgctttcagttcagcacgga

SEQ ID NO: 1663 - DNA, 35 bp, Artificial Sequence
  Synthetic oligonucleotide
agacagtggacttctcgtcgaaaatgcatctctat

SEQ ID NO: 1664 - DNA, 37 bp, Artificial Sequence
  Synthetic oligonucleotide
agagaacgttgcccttgagtgtttcttgagccttgga

SEQ ID NO: 1665 - DNA, 36 bp, Artificial Sequence
  Synthetic oligonucleotide
agcgtgtatcatcactgatttagttatcccgagcta

SEQ ID NO: 1666 - DNA, 36 bp, Artificial Sequence
  Synthetic oligonucleotide
agaggccagcttagtgtggccaccgtgagtttacta

SEQ ID NO: 1667 - DNA, 35 bp, Artificial Sequence
  Synthetic oligonucleotide
atatgtatacgaaccctcctaatcgcactatcagt

SEQ ID NO: 1668 - DNA, 38 bp, Artificial Sequence; identical to SEQ ID NO: 1653
  Synthetic oligonucleotide

SEQ ID NO: 1669 - DNA, 36 bp, Artificial Sequence
  Synthetic oligonucleotide
agtacctatcaaggattttgccgaatccgtgccgca

SEQ ID NO: 1670 - DNA, 35 bp, Artificial Sequence
  Synthetic oligonucleotide
agttcactctaacttccgtgccgaaggcgttatcc

SEQ ID NO: 1671 - DNA, 35 bp, Artificial Sequence
  Synthetic oligonucleotide
cacatcgactgcgcgatcaatattagggtggacat

SEQ ID NO: 1672 - DNA, 35 bp, Artificial Sequence
  Synthetic oligonucleotide
attgcattcttcaggacgcttcgcccgggattctt

SEQ ID NO: 1673 - DNA, 35 bp, Artificial Sequence
  Synthetic oligonucleotide
catccctgacgcgagttggaacatgagtacgtact

SEQ ID NO: 1674 - DNA, 36 bp, Artificial Sequence
  Synthetic oligonucleotide
caccgcttagtcttatttagggtcgctaatctggta

SEQ ID NO: 1675 - DNA, 36 bp, Artificial Sequence
  Synthetic oligonucleotide
caaaccgctgcaaaaggatccccgttatggctacat

SEQ ID NO: 1676 - DNA, 38 bp, Artificial Sequence
  Synthetic oligonucleotide
ccggaccattaggtcttcttgttcaaatactttgatga

SEQ ID NO: 1677 - DNA, 36 bp, Artificial Sequence
  Synthetic oligonucleotide
ccgagcttcgtttgggttcatttcgtccgattcgca

SEQ ID NO: 1678 - DNA, 38 bp, Artificial Sequence
  Synthetic oligonucleotide
cctcctattacagttccccgggaatgaatagcaactga

SEQ ID NO: 1679 - DNA, 38 bp, Artificial Sequence
  Synthetic oligonucleotide
cgcctataccgcactcgcttggaacgacacaaagctga

SEQ ID NO: 1680 - DNA, 38 bp, Artificial Sequence
  Synthetic oligonucleotide
cgtggattcgcccacatgatgatggccggtatgtttga

SEQ ID NO: 1681 - DNA, 37 bp, Artificial Sequence
  Synthetic oligonucleotide
ccttttgtaggacgccctttctgcgcatccggtagga

SEQ ID NO: 1682 - DNA, 37 bp, Artificial Sequence
  Synthetic oligonucleotide
ccttaactacacgagagcatgtcaaggggtaaatgga

SEQ ID NO: 1683 - DNA, 36 bp, Artificial Sequence; identical to SEQ ID NO: 1652
  Synthetic oligonucleotide

SEQ ID NO: 1684 - DNA, 38 bp, Artificial Sequence; identical to SEQ ID NO: 1562
  Synthetic oligonucleotide

SEQ ID NO: 1685 - DNA, 36 bp, Artificial Sequence
  Synthetic oligonucleotide
cggagtacgaagccgcttagattacctagcccgtta

SEQ ID NO: 1686 - DNA, 37 bp, Artificial Sequence
  Synthetic oligonucleotide
cgagcgacgtttgtttcaaaaatcactgggaatatga

SEQ ID NO: 1687 - DNA, 35 bp, Artificial Sequence
  Synthetic oligonucleotide
ctacatcgctctccgtaatcgggcgattcatttca

SEQ ID NO: 1688 - DNA, 38 bp, Artificial Sequence
  Synthetic oligonucleotide
gaaaacgttggaagtttttacgccgctctcagccgtga

SEQ ID NO: 1689 - DNA, 35 bp, Artificial Sequence
  Synthetic oligonucleotide
gaatttatgcaatccattaggaaaatgggtgtgcg

SEQ ID NO: 1690 - DNA, 36 bp, Artificial Sequence
  Synthetic oligonucleotide
ctgacagtcttccctggtctattgtccgcagatcga

SEQ ID NO: 1691 - DNA, 38 bp, Artificial Sequence; identical to SEQ ID NO: 1566
  Synthetic oligonucleotide

SEQ ID NO: 1692 - DNA, 36 bp, Artificial Sequence
  Synthetic oligonucleotide
gagggactgcacagcggtgatattctaaatgtacga

SEQ ID NO: 1693 - DNA, 38 bp, Artificial Sequence
  Synthetic oligonucleotide
gaccgggtaggcttctaggcgcccccctccttacttga

SEQ ID NO: 1694 - DNA, 35 bp, Artificial Sequence
  Synthetic oligonucleotide
gaccaaagtatgtgtggtattgatatgccgtgaac

SEQ ID NO: 1695 - DNA, 36 bp, Artificial Sequence
  Synthetic oligonucleotide
gagaaccgtgctcaaggcagaattgtcaccgctcga

SEQ ID NO: 1696 - DNA, 38 bp, Artificial Sequence
  Synthetic oligonucleotide
gacgagtgacttgcactacgaaggccctcgtcgcctga

SEQ ID NO: 1697 - DNA, 37 bp, Artificial Sequence
  Synthetic oligonucleotide
gagtttgtcttgccccgggtcgggacgttgtatccta

SEQ ID NO: 1698 - DNA, 35 bp, Artificial Sequence
  Synthetic oligonucleotide
gagtggcttactttcattggatccgtgagccttgc

SEQ ID NO: 1699 - DNA, 37 bp, Artificial Sequence
  Synthetic oligonucleotide
gcaatacgctagataggcttagaaacggaatacacga

SEQ ID NO: 1700 - DNA, 35 bp, Artificial Sequence
  Synthetic oligonucleotide
gatgtcgtcacggaagtacatatggcgctgtagcc

SEQ ID NO: 1701 - DNA, 35 bp, Artificial Sequence
  Synthetic oligonucleotide
gccactggatttaactgcatcccgtctctgaggct

SEQ ID NO: 1702 - DNA, 35 bp, Artificial Sequence; identical to SEQ ID NO: 1570
  Synthetic oligonucleotide

SEQ ID NO: 1703 - DNA, 37 bp, Artificial Sequence
  Synthetic oligonucleotide
gcaatatgggatatgtgtaactcagtgagacaggaga

SEQ ID NO: 1704 - DNA, 37 bp, Artificial Sequence
  Synthetic oligonucleotide
gattacataactcgtacgtcgcttgttttaagtttga

SEQ ID NO: 1705 - DNA, 37 bp, Artificial Sequence
  Synthetic oligonucleotide
gcgtgctgctttgtactacggtctcatcgttgtagga

SEQ ID NO: 1706 - DNA, 35 bp, Artificial Sequence
  Synthetic oligonucleotide
gccctggcaccaaagtcgcacaatcaatcgtgtgc

SEQ ID NO: 1707 - DNA, 36 bp, Artificial Sequence
  Synthetic oligonucleotide
gccgttggtattctgtcgtcttcctttgttctatca

SEQ ID NO: 1708 - DNA, 37 bp, Artificial Sequence
  Synthetic oligonucleotide
ggcactgtgctgcgatcaggaaaagtcacataccgga

SEQ ID NO: 1709 - DNA, 38 bp, Artificial Sequence
  Synthetic oligonucleotide
ggcccttgaattaacatgatgaatatcacaacgggtga

SEQ ID NO: 1710 - DNA, 36 bp, Artificial Sequence
  Synthetic oligonucleotide
gggtgtttcctgcttatgactacttttctttacgca

SEQ ID NO: 1711 - DNA, 35 bp, Artificial Sequence
  Synthetic oligonucleotide
ggctcgtattttcccagtatcgtttccggtacgtc

SEQ ID NO: 1712 - DNA, 35 bp, Artificial Sequence
  Synthetic oligonucleotide
ggggatctcgggcgatgaagcctagctattgtact

SEQ ID NO: 1713 - DNA, 35 bp, Artificial Sequence
  Synthetic oligonucleotide
ggtcccgtattccagatatactaacggttaccacc

SEQ ID NO: 1714 - DNA, 37 bp, Artificial Sequence
  Synthetic oligonucleotide
gtactgtccgtgtgaacgggtctctgcagaaattcga

SEQ ID NO: 1715 - DNA, 38 bp, Artificial Sequence
  Synthetic oligonucleotide
gtgatcggtactgttgaacttgttgcaccgcccgctga

SEQ ID NO: 1716 - DNA, 38 bp, Artificial Sequence
  Synthetic oligonucleotide
gtgtcacatggggtgaccggattgaggagaggatatga

SEQ ID NO: 1717 - DNA, 37 bp, Artificial Sequence
  Synthetic oligonucleotide
gtgtcctttctgggttgatgcatttacggtttggtga

SEQ ID NO: 1718 - DNA, 37 bp, Artificial Sequence
  Synthetic oligonucleotide
gttcggttggttcccgcgctgaacaatattacctgga

SEQ ID NO: 1719 - DNA, 36 bp, Artificial Sequence
  Synthetic oligonucleotide
gttgggacccgattaacccaacagaattcggaataa

SEQ ID NO: 1720 - DNA, 36 bp, Artificial Sequence
  Synthetic oligonucleotide
tacctgagcgctggagctcgttagtcggaataggaa

SEQ ID NO: 1721 - DNA, 35 bp, Artificial Sequence
  Synthetic oligonucleotide
tacccgttcaccggataggatgttcgtccttaatt

SEQ ID NO: 1722 - DNA, 38 bp, Artificial Sequence
  Synthetic oligonucleotide
taccgatcaacccagcaaggcttgggtggattgaatga

SEQ ID NO: 1723 - DNA, 36 bp, Artificial Sequence
  Synthetic oligonucleotide
tccccccgtcgcttacggtgttggacgggctcatta

SEQ ID NO: 1724 - DNA, 36 bp, Artificial Sequence
  Synthetic oligonucleotide
tcttcataaatgactaacgcttcttagtgatgttga

SEQ ID NO: 1725 - DNA, 36 bp, Artificial Sequence
  Synthetic oligonucleotide
tgccatacctacccagagtgagacttctagcctgga

SEQ ID NO: 1726 - DNA, 38 bp, Artificial Sequence
  Synthetic oligonucleotide
tgaggtcccttttgtcggggtatatccatgaggtttga

SEQ ID NO: 1727 - DNA, 37 bp, Artificial Sequence
  Synthetic oligonucleotide
tggcttggcccgttcgttcgtgatcaagattttttga

SEQ ID NO: 1728 - DNA, 38 bp, Artificial Sequence
  Synthetic oligonucleotide
tggtctgaaattcccgtgaggagatagatcatttctga

SEQ ID NO: 1729 - DNA, 35 bp, Artificial Sequence
  Synthetic oligonucleotide
tgtccaaatcactcattctcgtaaggttaccgtcc

SEQ ID NO: 1730 - DNA, 36 bp, Artificial Sequence
  Synthetic oligonucleotide
tgttctgtcttatgccatgaagttcttataagtaga

SEQ ID NO: 1731 - DNA, 38 bp, Artificial Sequence
  Synthetic oligonucleotide
ttacccctgtaatgccctacatgatgttcggttcatga

SEQ ID NO: 1732 - DNA, 35 bp, Artificial Sequence
  Synthetic oligonucleotide
ttgtaccagtgcgtatgttgtctcatcaatgtttt

SEQ ID NO: 1733 - DNA, 37 bp, Artificial Sequence
  Synthetic oligonucleotide
ttttagcaacgggagttgcagcggggttgttaaacga

SEQ ID NO: 1734 - DNA, 35 bp, Artificial Sequence; identical to SEQ ID NO: 1591
  Synthetic oligonucleotide

SEQ ID NO: 1735 - DNA, 36 bp, Artificial Sequence; identical to SEQ ID NO: 1586
  Synthetic oligonucleotide

SEQ ID NO: 1736 - DNA, 36 bp, Artificial Sequence; identical to SEQ ID NO: 1589
  Synthetic oligonucleotide

SEQ ID NO: 1737 - DNA, 38 bp, Artificial Sequence; identical to SEQ ID NO: 1612
  Synthetic oligonucleotide

SEQ ID NO: 1738 - DNA, 35 bp, Artificial Sequence; identical to SEQ ID NO: 1594
  Synthetic oligonucleotide

SEQ ID NO: 1739 - DNA, 37 bp, Artificial Sequence; identical to SEQ ID NO: 1595
  Synthetic oligonucleotide

SEQ ID NO: 1740 - DNA, 35 bp, Artificial Sequence
  Synthetic oligonucleotide
attccgtgaggtacgtaaggcaaccagttttattt

SEQ ID NO: 1741 - DNA, 36 bp, Artificial Sequence; identical to SEQ ID NO: 1593
  Synthetic oligonucleotide

SEQ ID NO: 1742 - DNA, 37 bp, Artificial Sequence; identical to SEQ ID NO: 1587
  Synthetic oligonucleotide

SEQ ID NO: 1743 - DNA, 38 bp, Artificial Sequence; identical to SEQ ID NO: 1596
  Synthetic oligonucleotide

SEQ ID NO: 1744 - DNA, 35 bp, Artificial Sequence; identical to SEQ ID NO: 1600
  Synthetic oligonucleotide

SEQ ID NO: 1745 - DNA, 35 bp, Artificial Sequence; identical to SEQ ID NO: 1606
  Synthetic oligonucleotide

SEQ ID NO: 1746 - DNA, 38 bp, Artificial Sequence; identical to SEQ ID NO: 1608
  Synthetic oligonucleotide

SEQ ID NO: 1747 - DNA, 38 bp, Artificial Sequence; identical to SEQ ID NO: 1601
  Synthetic oligonucleotide

SEQ ID NO: 1748 - DNA, 35 bp, Artificial Sequence; identical to SEQ ID NO: 1605
  Synthetic oligonucleotide

SEQ ID NO: 1749 - DNA, 36 bp, Artificial Sequence; identical to SEQ ID NO: 1611
  Synthetic oligonucleotide

SEQ ID NO: 1750 - DNA, 36 bp, Artificial Sequence
  Synthetic oligonucleotide
tcttgtcgggattttgctcctttcatactcatggta

SEQ ID NO: 1751 - DNA, 36 bp, Artificial Sequence; identical to SEQ ID NO: 1598
  Synthetic oligonucleotide

SEQ ID NO: 1752 - DNA, 35 bp, Artificial Sequence; identical to SEQ ID NO: 1599
  Synthetic oligonucleotide

SEQ ID NO: 1753 - DNA, 36 bp, Artificial Sequence; identical to SEQ ID NO: 1603
  Synthetic oligonucleotide

SEQ ID NO: 1754 - DNA, 38 bp, Artificial Sequence; identical to SEQ ID NO: 1609
  Synthetic oligonucleotide

SEQ ID NO: 1755 - DNA, 36 bp, Artificial Sequence; identical to SEQ ID NO: 1593
  Synthetic oligonucleotide

SEQ ID NO: 1756 - DNA, 35 bp, Artificial Sequence; identical to SEQ ID NO: 1591
  Synthetic oligonucleotide

SEQ ID NO: 1757 - DNA, 36 bp, Artificial Sequence; identical to SEQ ID NO: 1590
  Synthetic oligonucleotide

SEQ ID NO: 1758 - DNA, 36 bp, Artificial Sequence; identical to SEQ ID NO: 1617
  Synthetic oligonucleotide

SEQ ID NO: 1759 - DNA, 36 bp, Artificial Sequence; identical to SEQ ID NO: 1616
  Synthetic oligonucleotide

SEQ ID NO: 1760 - DNA, 36 bp, Artificial Sequence; identical to SEQ ID NO: 1586
  Synthetic oligonucleotide

SEQ ID NO: 1761 - DNA, 35 bp, Artificial Sequence; identical to SEQ ID NO: 1620
  Synthetic oligonucleotide

SEQ ID NO: 1762 - DNA, 35 bp, Artificial Sequence; identical to SEQ ID NO: 1594
  Synthetic oligonucleotide

SEQ ID NO: 1763 - DNA, 37 bp, Artificial Sequence; identical to SEQ ID NO: 1587
  Synthetic oligonucleotide

SEQ ID NO: 1764 - DNA, 38 bp, Artificial Sequence; identical to SEQ ID NO: 1596
  Synthetic oligonucleotide

SEQ ID NO: 1765 - DNA, 36 bp, Artificial Sequence; identical to SEQ ID NO: 1589
  Synthetic oligonucleotide

SEQ ID NO: 1766 - DNA, 37 bp, Artificial Sequence; identical to SEQ ID NO: 1595
  Synthetic oligonucleotide

SEQ ID NO: 1767 - DNA, 37 bp, Artificial Sequence
  Synthetic oligonucleotide
gagcgactcatcccggggtttggatcagcgctccgga

SEQ ID NO: 1768 - DNA, 37 bp, Artificial Sequence; identical to SEQ ID NO: 1628
  Synthetic oligonucleotide

SEQ ID NO: 1769 - DNA, 36 bp, Artificial Sequence
  Synthetic oligonucleotide
ggtctcttggtttagatcccgtcttttctgtggaaa

SEQ ID NO: 1770 - DNA, 38 bp, Artificial Sequence; identical to SEQ ID NO: 1601
  Synthetic oligonucleotide

SEQ ID NO: 1771 - DNA, 35 bp, Artificial Sequence; identical to SEQ ID NO: 1606
  Synthetic oligonucleotide

SEQ ID NO: 1772 - DNA, 38 bp, Artificial Sequence
  Synthetic oligonucleotide
gtccaggctctatgcttagtacccgttcatttgcttga

SEQ ID NO: 1773 - DNA, 36 bp, Artificial Sequence; identical to SEQ ID NO: 1603
  Synthetic oligonucleotide

SEQ ID NO: 1774 - DNA, 38 bp, Artificial Sequence; identical to SEQ ID NO: 1636
  Synthetic oligonucleotide

SEQ ID NO: 1775 - DNA, 35 bp, Artificial Sequence; identical to SEQ ID NO: 1637
  Synthetic oligonucleotide

SEQ ID NO: 1776 - DNA, 36 bp, Artificial Sequence; identical to SEQ ID NO: 1638
  Synthetic oligonucleotide

SEQ ID NO: 1777 - DNA, 35 bp, Artificial Sequence
  Synthetic oligonucleotide
tcctagaaatctgtattgtttctcaaggccacctg

SEQ ID NO: 1778 - DNA, 37 bp, Artificial Sequence; identical to SEQ ID NO: 1639
  Synthetic oligonucleotide

SEQ ID NO: 1779 - DNA, 36 bp, Artificial Sequence; identical to SEQ ID NO: 1750
  Synthetic oligonucleotide

SEQ ID NO: 1780 - DNA, 38 bp, Artificial Sequence; identical to SEQ ID NO: 1609
  Synthetic oligonucleotide

SEQ ID NO: 1781 - DNA, 35 bp, Artificial Sequence
  Synthetic oligonucleotide
tgttttatctggatcacactagctattgtacggtt

SEQ ID NO: 1782 - DNA, 37 bp, Artificial Sequence; identical to SEQ ID NO: 1643
  Synthetic oligonucleotide

SEQ ID NO: 1783 - DNA, 37 bp, Artificial Sequence; identical to SEQ ID NO: 1645
  Synthetic oligonucleotide

SEQ ID NO: 1784 - DNA, 37 bp, Artificial Sequence; identical to SEQ ID NO: 1646
  Synthetic oligonucleotide

SEQ ID NO: 1785 - DNA, 35 bp, Artificial Sequence; identical to SEQ ID NO: 1647
  Synthetic oligonucleotide

SEQ ID NO: 1786 - DNA, 35 bp, Artificial Sequence; identical to SEQ ID NO: 1605
  Synthetic oligonucleotide

SEQ ID NO: 1787 - DNA, 37 bp, Artificial Sequence
  Synthetic oligonucleotide
tttgagcgcctcagtttgcgcgacttccagcccgtga

SEQ ID NO: 1788 - DNA, 37 bp, Artificial Sequence; identical to SEQ ID NO: 1649
  Synthetic oligonucleotide

SEQ ID NO: 1789 - DNA, 37 bp, Artificial Sequence; identical to SEQ ID NO: 1650
  Synthetic oligonucleotide

SEQ ID NO: 1790 - DNA, 36 bp, Artificial Sequence; identical to SEQ ID NO: 1652
  Synthetic oligonucleotide

SEQ ID NO: 1791 - DNA, 38 bp, Artificial Sequence; identical to SEQ ID NO: 1653
  Synthetic oligonucleotide

SEQ ID NO: 1792 - DNA, 38 bp, Artificial Sequence
  Synthetic oligonucleotide
atgctatcccgtgaaacgagaacatacggtttttttga

SEQ ID NO: 1793 - DNA, 35 bp, Artificial Sequence; identical to SEQ ID NO: 1654
  Synthetic oligonucleotide

SEQ ID NO: 1794 - DNA, 36 bp, Artificial Sequence; identical to SEQ ID NO: 1540
  Synthetic oligonucleotide

SEQ ID NO: 1795 - DNA, 36 bp, Artificial Sequence
  Synthetic oligonucleotide
agggcaatctgtcccgccctcagcttttttatttaa

SEQ ID NO: 1796 - DNA, 37 bp, Artificial Sequence; identical to SEQ ID NO: 1555
  Synthetic oligonucleotide

SEQ ID NO: 1797 - DNA, 38 bp, Artificial Sequence; identical to SEQ ID NO: 1543
  Synthetic oligonucleotide

SEQ ID NO: 1798 - DNA, 38 bp, Artificial Sequence
  Synthetic oligonucleotide
accgaaaacccgttcccgccgtactgcttctatattga

SEQ ID NO: 1799 - DNA, 36 bp, Artificial Sequence; identical to SEQ ID NO: 1549
  Synthetic oligonucleotide

SEQ ID NO: 1800 - DNA, 36 bp, Artificial Sequence; identical to SEQ ID NO: 1547
  Synthetic oligonucleotide

SEQ ID NO: 1801 - DNA, 35 bp, Artificial Sequence; identical to SEQ ID NO: 1550
  Synthetic oligonucleotide

SEQ ID NO: 1802 - DNA, 35 bp, Artificial Sequence; identical to SEQ ID NO: 1551
  Synthetic oligonucleotide

SEQ ID NO: 1803 - DNA, 35 bp, Artificial Sequence; identical to SEQ ID NO: 1546
  Synthetic oligonucleotide

SEQ ID NO: 1804 - DNA, 38 bp, Artificial Sequence
  Synthetic oligonucleotide
tttccgattattatgaccgcttttattattggaggtga

SEQ ID NO: 1805 - DNA, 38 bp, Artificial Sequence
  Synthetic oligonucleotide
tcttggacgtgcgtgatccccattttatatatgattga

SEQ ID NO: 1806 - DNA, 38 bp, Artificial Sequence; identical to SEQ ID NO: 1543
  Synthetic oligonucleotide

SEQ ID NO: 1807 - DNA, 36 bp, Artificial Sequence; identical to SEQ ID NO: 1553
  Synthetic oligonucleotide

SEQ ID NO: 1808 - DNA, 36 bp, Artificial Sequence; identical to SEQ ID NO: 1540
  Synthetic oligonucleotide

SEQ ID NO: 1809 - DNA, 37 bp, Artificial Sequence; identical to SEQ ID NO: 1542
  Synthetic oligonucleotide

SEQ ID NO: 1810 - DNA, 36 bp, Artificial Sequence; identical to SEQ ID NO: 1549
  Synthetic oligonucleotide

SEQ ID NO: 1811 - DNA, 35 bp, Artificial Sequence; identical to SEQ ID NO: 1551
  Synthetic oligonucleotide

SEQ ID NO: 1812 - DNA, 38 bp, Artificial Sequence; identical to SEQ ID NO: 1805
  Synthetic oligonucleotide

SEQ ID NO: 1813 - DNA, 35 bp, Artificial Sequence; identical to SEQ ID NO: 1546
  Synthetic oligonucleotide

SEQ ID NO: 1814 - DNA, 38 bp, Artificial Sequence
  Synthetic oligonucleotide
tgcccttagtttccgtatgaccactttgattcttttga

SEQ ID NO: 1815 - DNA, 38 bp, Artificial Sequence; identical to SEQ ID NO: 1804
  Synthetic oligonucleotide

SEQ ID NO: 1816 - DNA, 38 bp, Artificial Sequence
  Synthetic oligonucleotide
attcgcatagcctatgggaagggaattgtgaggggtga

SEQ ID NO: 1817 - DNA, 38 bp, Artificial Sequence
  Synthetic oligonucleotide
gaggttccctgtgggtcatgtcgcacgatttttagtga

SEQ ID NO: 1818 - DNA, 38 bp, Artificial Sequence; identical to SEQ ID NO: 1543
  Synthetic oligonucleotide

SEQ ID NO: 1819 - DNA, 38 bp, Artificial Sequence; identical to SEQ ID NO: 1548
  Synthetic oligonucleotide

SEQ ID NO: 1820 - DNA, 37 bp, Artificial Sequence
  Synthetic oligonucleotide
tgcccgcttttggtttatatggcttcttatctttcga

SEQ ID NO: 1821 - DNA, 38 bp, Artificial Sequence; identical to SEQ ID NO: 1804
  Synthetic oligonucleotide

SEQ ID NO: 1822 - DNA, 35 bp, Artificial Sequence; identical to SEQ ID NO: 1550
  Synthetic oligonucleotide

SEQ ID NO: 1823 - DNA, 38 bp, Artificial Sequence
  Synthetic oligonucleotide
aaacgtgggggcgtcccagccccatgtgttatctctga

SEQ ID NO: 1824 - DNA, 38 bp, Artificial Sequence
  Synthetic oligonucleotide
aaccctctcccatcctctcgaaacactagattacctga

SEQ ID NO: 1825 - DNA, 35 bp, Artificial Sequence
  Synthetic oligonucleotide
aacatacgtcccaagcgcatctcgattctatcttc

SEQ ID NO: 1826 - DNA, 37 bp, Artificial Sequence
  Synthetic oligonucleotide
aaccacgcctaaatggattcacttcctcaaaaattga

SEQ ID NO: 1827 - DNA, 37 bp, Artificial Sequence
  Synthetic oligonucleotide
aacgccgcacttcgttaaaagtctataaaactctaga

SEQ ID NO: 1828 - DNA, 37 bp, Artificial Sequence
  Synthetic oligonucleotide
aacgaagtattataacccttgtgtatcccgaccatga

SEQ ID NO: 1829 - DNA, 35 bp, Artificial Sequence
  Synthetic oligonucleotide
aacaaagttcacccataccacaaccccaattcgac

SEQ ID NO: 1830 - DNA, 38 bp, Artificial Sequence
  Synthetic oligonucleotide
aacggctgggaggggtagcattttaactatatttctga

SEQ ID NO: 1831 - DNA, 38 bp, Artificial Sequence
  Synthetic oligonucleotide
aagtggtccgtttcggcaataagtacaacgggatctga

SEQ ID NO: 1832 - DNA, 38 bp, Artificial Sequence
  Synthetic oligonucleotide
aactctgcataactaaccgacgccaactattatcctga

SEQ ID NO: 1833 - DNA, 36 bp, Artificial Sequence
  Synthetic oligonucleotide
aatcaggcttgtttgctagacaaaataagcacgaaa

SEQ ID NO: 1834 - DNA, 38 bp, Artificial Sequence
  Synthetic oligonucleotide
aattgcgttttccggttgactaaaaacacggaatctga

SEQ ID NO: 1835 - DNA, 36 bp, Artificial Sequence
  Synthetic oligonucleotide
aataaacacttcgaccaaactaaggccttatctcca

SEQ ID NO: 1836 - DNA, 38 bp, Artificial Sequence
  Synthetic oligonucleotide
aagtttcctggtcgcccgcttctgaaaagttagtttga

SEQ ID NO: 1837 - DNA, 38 bp, Artificial Sequence
  Synthetic oligonucleotide
aagagggctatgatttagccggtgcctccttgctttga

SEQ ID NO: 1838 - DNA, 37 bp, Artificial Sequence
  Synthetic oligonucleotide
aagccggtatcgcccgtaacattcccttcctctagga

SEQ ID NO: 1839 - DNA, 38 bp, Artificial Sequence
  Synthetic oligonucleotide
aacttcaccgatacggttcttttctctaacccgcttga

SEQ ID NO: 1840 - DNA, 37 bp, Artificial Sequence
  Synthetic oligonucleotide
aaggatagccataggctgatggggactcaacaggtga

SEQ ID NO: 1841 - DNA, 36 bp, Artificial Sequence
  Synthetic oligonucleotide
aatcgtcttacgtgcccttgataaatcccatactaa

SEQ ID NO: 1842 - DNA, 38 bp, Artificial Sequence
  Synthetic oligonucleotide
aattcgcgcgaattgaagaggcccatggcccgctctga

SEQ ID NO: 1843 - DNA, 37 bp, Artificial Sequence
  Synthetic oligonucleotide
accatgaatcaccgcgcctgctactgcaacttttgga

SEQ ID NO: 1844 - DNA, 36 bp, Artificial Sequence
  Synthetic oligonucleotide
acactggcatttttcgaaacatagaatgaatgggaa

SEQ ID NO: 1845 - DNA, 37 bp, Artificial Sequence
  Synthetic oligonucleotide
acacccacaagctttaacttatcataactcgccccga

SEQ ID NO: 1846 - DNA, 35 bp, Artificial Sequence
  Synthetic oligonucleotide
acccaacgttgagcgcaataccccttcataatacc

SEQ ID NO: 1847 - DNA, 35 bp, Artificial Sequence
  Synthetic oligonucleotide
acctctctctgaaatttaactctattctcccattc

SEQ ID NO: 1848 - DNA, 35 bp, Artificial Sequence
  Synthetic oligonucleotide
accggactagatatttaccacattgcatttccata

SEQ ID NO: 1849 - DNA, 35 bp, Artificial Sequence
  Synthetic oligonucleotide
acgctgaatctggttcacaacggggaacgtgttag

SEQ ID NO: 1850 - DNA, 38 bp, Artificial Sequence
  Synthetic oligonucleotide
acccgctgtgtgaaccaccgtgccttcggacgtcatga

SEQ ID NO: 1851 - DNA, 35 bp, Artificial Sequence
  Synthetic oligonucleotide
accgctctctgaaatttatctctattctcccattc

SEQ ID NO: 1852 - DNA, 36 bp, Artificial Sequence
  Synthetic oligonucleotide
acggtacactcactttcctaaatccctctttatcta

SEQ ID NO: 1853 - DNA, 38 bp, Artificial Sequence
  Synthetic oligonucleotide
acgccccagcctatttaccttggagtttctttgactga

SEQ ID NO: 1854 - DNA, 35 bp, Artificial Sequence
  Synthetic oligonucleotide
acccggcgaagacgttagctctggcgctccgttca

SEQ ID NO: 1855 - DNA, 38 bp, Artificial Sequence
  Synthetic oligonucleotide
actatcccaggtttacattagtgtgccccgcattctga

SEQ ID NO: 1856 - DNA, 38 bp, Artificial Sequence
  Synthetic oligonucleotide
actgctttttttgcccaatatctcgagtaaccccctga

SEQ ID NO: 1857 - DNA, 35 bp, Artificial Sequence
  Synthetic oligonucleotide
actgaacactctacatgaccataaacacctctctt

SEQ ID NO: 1858 - DNA, 37 bp, Artificial Sequence
  Synthetic oligonucleotide
actcgggcttccatcaagcttctgattggtgaggtga

SEQ ID NO: 1859 - DNA, 35 bp, Artificial Sequence
  Synthetic oligonucleotide
actgaacactctacatgactgtaaacacctctctt

SEQ ID NO: 1860 - DNA, 38 bp, Artificial Sequence
  Synthetic oligonucleotide
acgtttttctcgctcgtaattttatcgttaatttctga

SEQ ID NO: 1861 - DNA, 37 bp, Artificial Sequence
  Synthetic oligonucleotide
actactcatccccccgtcttaacaacgatcccactga

SEQ ID NO: 1862 - DNA, 37 bp, Artificial Sequence
  Synthetic oligonucleotide
actacgcgctcatcggccagagttccggtcaaccgga

SEQ ID NO: 1863 - DNA, 36 bp, Artificial Sequence
  Synthetic oligonucleotide
acttcacccacacaatacccttatcgataactcaaa

SEQ ID NO: 1864 - DNA, 36 bp, Artificial Sequence
  Synthetic oligonucleotide
acgttacgccgggggactataagcagttcagtagca

SEQ ID NO: 1865 - DNA, 36 bp, Artificial Sequence
  Synthetic oligonucleotide
agacctattccccaatcctgaattacaacatctcta

SEQ ID NO: 1866 - DNA, 35 bp, Artificial Sequence
  Synthetic oligonucleotide
agcacccgcccgcttctattcctcgatcctacact

SEQ ID NO: 1867 - DNA, 35 bp, Artificial Sequence
  Synthetic oligonucleotide
agccccagagtttatccggcttggccggcaattcc

SEQ ID NO: 1868 - DNA, 35 bp, Artificial Sequence
  Synthetic oligonucleotide
aggaatcgatcctggtggttttagctttgaccctt

SEQ ID NO: 1869 - DNA, 37 bp, Artificial Sequence
  Synthetic oligonucleotide
agacttagactcaataactggaccctttacacaccgt

SEQ ID NO: 1870 - DNA, 37 bp, Artificial Sequence; identical to SEQ ID NO: 1555
  Synthetic oligonucleotide

SEQ ID NO: 1871 - DNA, 38 bp, Artificial Sequence
  Synthetic oligonucleotide
atacacgctgcccatttccactcgtcaaaccactatga

SEQ ID NO: 1872 - DNA, 35 bp, Artificial Sequence
  Synthetic oligonucleotide
agttcgcgcaaccccttctcgcttgtgtggcttaa

SEQ ID NO: 1873 - DNA, 35 bp, Artificial Sequence
  Synthetic oligonucleotide
atcaagccggtgtaggcgctccaggcctttcagcc

SEQ ID NO: 1874 - DNA, 35 bp, Artificial Sequence
  Synthetic oligonucleotide
agtcatccattacctcaatgttcatctattttcac

SEQ ID NO: 1875 - DNA, 38 bp, Artificial Sequence
  Synthetic oligonucleotide
atcctctacgttccaaccacttacttttatgccattga

SEQ ID NO: 1876 - DNA, 38 bp, Artificial Sequence
  Synthetic oligonucleotide
atcacactctaactgtaatcaatcatttcgaaccctga

SEQ ID NO: 1877 - DNA, 38 bp, Artificial Sequence
  Synthetic oligonucleotide
atcccttccaattccctataattactactctaatgtga

SEQ ID NO: 1878 - DNA, 37 bp, Artificial Sequence
  Synthetic oligonucleotide
atcccacttgccatcttcggtcctatcaaatggtaga

SEQ ID NO: 1879 - DNA, 34 bp, Artificial Sequence
  Synthetic oligonucleotide
atcttaatgccttgatccgactcctacctcttga

SEQ ID NO: 1880 - DNA, 38 bp, Artificial Sequence
  Synthetic oligonucleotide
atgccccccgcgcttttaactcacacctgctctgctga

SEQ ID NO: 1881 - DNA, 35 bp, Artificial Sequence
  Synthetic oligonucleotide
atgcagtcgttaacgtccatcgcgtgtgtcttccg

SEQ ID NO: 1882 - DNA, 38 bp, Artificial Sequence
  Synthetic oligonucleotide
atcccttttattgttaaacttcatagaaatcatactga

SEQ ID NO: 1883 - DNA, 37 bp, Artificial Sequence
  Synthetic oligonucleotide
atcttcccgccacttgtgccttatcattaccccccga

SEQ ID NO: 1884 - DNA, 36 bp, Artificial Sequence
  Synthetic oligonucleotide
atcccaattcacatacactctcaccctcactaaaca

SEQ ID NO: 1885 - DNA, 36 bp, Artificial Sequence
  Synthetic oligonucleotide
atctacaccctatcgaaacttcccatgaaactacaa

SEQ ID NO: 1886 - DNA, 35 bp, Artificial Sequence
  Synthetic oligonucleotide
attggtgcccgttgtgaggatcaagcaacatgcta

SEQ ID NO: 1887 - DNA, 38 bp, Artificial Sequence
  Synthetic oligonucleotide
caaacgtaccttactgcatacaccttccctgttattga

SEQ ID NO: 1888 - DNA, 35 bp, Artificial Sequence
  Synthetic oligonucleotide
attgaacgagcgagaaatctaagcgccggcatctg

SEQ ID NO: 1889 - DNA, 35 bp, Artificial Sequence
  Synthetic oligonucleotide
atttcctaacattgctctcttaactgttcctatcc

SEQ ID NO: 1890 - DNA, 37 bp, Artificial Sequence
  Synthetic oligonucleotide
cacctggccattacactttccttttgagttctctcga

SEQ ID NO: 1891 - DNA, 38 bp, Artificial Sequence
  Synthetic oligonucleotide
attttagcatacggctccttggtttcatcagctgttga

SEQ ID NO: 1892 - DNA, 35 bp, Artificial Sequence
  Synthetic oligonucleotide
attcgaattctccacctgataaccgccacattaaa

SEQ ID NO: 1893 - DNA, 36 bp, Artificial Sequence
  Synthetic oligonucleotide
atgtttgtcggcctttgtgggtcctttcgcttccca

SEQ ID NO: 1894 - DNA, 38 bp, Artificial Sequence
  Synthetic oligonucleotide
ccgcaacccaactcgtattctaatctactacacattga

SEQ ID NO: 1895 - DNA, 36 bp, Artificial Sequence; identical to SEQ ID NO: 1541
  Synthetic oligonucleotide

SEQ ID NO: 1896 - DNA, 35 bp, Artificial Sequence
  Synthetic oligonucleotide
ccccaaggacgcacgggggtacccgcatactgtta

SEQ ID NO: 1897 - DNA, 36 bp, Artificial Sequence
  Synthetic oligonucleotide
ccagccggtccaggtggctgacccgcgaaggagcta

SEQ ID NO: 1898 - DNA, 37 bp, Artificial Sequence
  Synthetic oligonucleotide
cccgtcatgaaccgggacccaatcttaccttttatga

SEQ ID NO: 1899 - DNA, 37 bp, Artificial Sequence
  Synthetic oligonucleotide
ccgcgcgttagctacggatggcattaacccagttgga

SEQ ID NO: 1900 - DNA, 38 bp, Artificial Sequence
  Synthetic oligonucleotide
catggctctcatccgaagacgcgccttcttctatttga

SEQ ID NO: 1901 - DNA, 38 bp, Artificial Sequence
  Synthetic oligonucleotide
ccgctggcgctattttttttctatgctgttggagctga

SEQ ID NO: 1902 - DNA, 36 bp, Artificial Sequence
  Synthetic oligonucleotide
catggatttagtcgtccctagccgaacttctgttaa

SEQ ID NO: 1903 - DNA, 38 bp, Artificial Sequence
  Synthetic oligonucleotide
ccgcttaacggggcacccaactaattcgatatctctga

SEQ ID NO: 1904 - DNA, 36 bp, Artificial Sequence
  Synthetic oligonucleotide
cggtccgtcgacccatgttttttggctctattgcta

SEQ ID NO: 1905 - DNA, 36 bp, Artificial Sequence; identical to SEQ ID NO: 1540
  Synthetic oligonucleotide

SEQ ID NO: 1906 - DNA, 38 bp, Artificial Sequence
  Synthetic oligonucleotide
cgctattattactctccccgggtaatatcctatattga

SEQ ID NO: 1907 - DNA, 36 bp, Artificial Sequence
  Synthetic oligonucleotide
ccttgaaaggtgtaacgcacgttggatcgtcgtgaa

SEQ ID NO: 1908 - DNA, 36 bp, Artificial Sequence
  Synthetic oligonucleotide
cgacgaaaccggacaccatacccttacgacttttaa

SEQ ID NO: 1909 - DNA, 35 bp, Artificial Sequence
  Synthetic oligonucleotide
ccttaccccgagcgtgcccccttcttaagtattcg

SEQ ID NO: 1910 - DNA, 36 bp, Artificial Sequence
  Synthetic oligonucleotide
cgttttatagtttcgatctaaggttcattatatata

SEQ ID NO: 1911 - DNA, 38 bp, Artificial Sequence
  Synthetic oligonucleotide
cgcttaattcttggttatattatctaactacgcaatga

SEQ ID NO: 1912 - DNA, 37 bp, Artificial Sequence
  Synthetic oligonucleotide
ctctaccgagtcccttacatatgtacccacttccaga

SEQ ID NO: 1913 - DNA, 37 bp, Artificial Sequence
  Synthetic oligonucleotide
gaacccgagggagggattctcaatgtgcaatgtatga

SEQ ID NO: 1914 - DNA, 38 bp, Artificial Sequence
  Synthetic oligonucleotide
cttcggggcactaccttcgtttttttgttctactatga

SEQ ID NO: 1915 - DNA, 37 bp, Artificial Sequence
  Synthetic oligonucleotide
gaagccccataaaagacgccgaaatattgcatctgga

SEQ ID NO: 1916 - DNA, 37 bp, Artificial Sequence
  Synthetic oligonucleotide
gaaactaaaccgactgggttaaattttatcatgcgga

SEQ ID NO: 1917 - DNA, 37 bp, Artificial Sequence
  Synthetic oligonucleotide
gagcttaaacctctccgagcgcttatggctcgattga

SEQ ID NO: 1918 - DNA, 35 bp, Artificial Sequence
  Synthetic oligonucleotide
gaggaaacgcggcagccttataggccgatctttca

SEQ ID NO: 1919 - DNA, 38 bp, Artificial Sequence
  Synthetic oligonucleotide
gaggtttaataaataggccatgcttattggtccgctga

SEQ ID NO: 1920 - DNA, 37 bp, Artificial Sequence
  Synthetic oligonucleotide
gatcacgtcgcggattcccccgtttcgcgagaggaga

SEQ ID NO: 1921 - DNA, 37 bp, Artificial Sequence
  Synthetic oligonucleotide
gagttcctttatttgcatttttatcagatcaagttta

SEQ ID NO: 1922 - DNA, 36 bp, Artificial Sequence
  Synthetic oligonucleotide
gagtcctctacttcatataatctccagaggggggga

SEQ ID NO: 1923 - DNA, 35 bp, Artificial Sequence
  Synthetic oligonucleotide
gagtttcgatattcgtcttaaatccacccctgtaa

SEQ ID NO: 1924 - DNA, 36 bp, Artificial Sequence
  Synthetic oligonucleotide
gagtacgatttgaccactatcttcgtagattccata

SEQ ID NO: 1925 - DNA, 37 bp, Artificial Sequence
  Synthetic oligonucleotide
gataacgggaaccaaatcgcgctgtagaggcctggga

SEQ ID NO: 1926 - DNA, 36 bp, Artificial Sequence
  Synthetic oligonucleotide
gatctacccgaccctattaaccttagtacttgacaa

SEQ ID NO: 1927 - DNA, 38 bp, Artificial Sequence
  Synthetic oligonucleotide
gatccctaattgttttcctattaatcgttttcccatga

SEQ ID NO: 1928 - DNA, 36 bp, Artificial Sequence
  Synthetic oligonucleotide
gatcgctcgccaggcacactgccgtttcgagtatta

SEQ ID NO: 1929 - DNA, 36 bp, Artificial Sequence
  Synthetic oligonucleotide
gcacgacgaacgagtccgggaggaccggcttcccca

SEQ ID NO: 1930 - DNA, 35 bp, Artificial Sequence
  Synthetic oligonucleotide
gatcttatccggcccacatctttaaccccaacact

SEQ ID NO: 1931 - DNA, 35 bp, Artificial Sequence
  Synthetic oligonucleotide
gccgtctcggggtaatcggcctaatacgtagacat

SEQ ID NO: 1932 - DNA, 37 bp, Artificial Sequence
  Synthetic oligonucleotide
gccgcggggggccggggaggtcccatcgaggttatga

SEQ ID NO: 1933 - DNA, 38 bp, Artificial Sequence
  Synthetic oligonucleotide
gctaacctttgttatactaggactttctccacaggtga

SEQ ID NO: 1934 - DNA, 35 bp, Artificial Sequence
  Synthetic oligonucleotide
ggggtttcttggagcgcaatacggtttgtttctga

SEQ ID NO: 1935 - DNA, 35 bp, Artificial Sequence
  Synthetic oligonucleotide
ggcgaaactagcctggattggagttagacctttca

SEQ ID NO: 1936 - DNA, 38 bp, Artificial Sequence
  Synthetic oligonucleotide
gggggagttgcatggttgcaactctggaggccctttga

SEQ ID NO: 1937 - DNA, 37 bp, Artificial Sequence
  Synthetic oligonucleotide
gggtttaacgtgcccacccgtcagggtagtcctacga

SEQ ID NO: 1938 - DNA, 35 bp, Artificial Sequence
  Synthetic oligonucleotide
gggtatgccgttctgtccgggccttatgcgcatat

SEQ ID NO: 1939 - DNA, 37 bp, Artificial Sequence
  Synthetic oligonucleotide
gggacaatagaattaaactcgggcttaggtcctcgga

SEQ ID NO: 1940 - DNA, 37 bp, Artificial Sequence
  Synthetic oligonucleotide
ggggagatggctgggtcttgataccggaaacttgcga

SEQ ID NO: 1941 - DNA, 38 bp, Artificial Sequence
  Synthetic oligonucleotide
ggcttgtatacctattatgttaggcaggtgccctttga

SEQ ID NO: 1942 - DNA, 36 bp, Artificial Sequence
  Synthetic oligonucleotide
gtggcccggttgtgttgtcacggacgtgcggtccca

SEQ ID NO: 1943 - DNA, 36 bp, Artificial Sequence
  Synthetic oligonucleotide
gtgttgtatgtcttcgcaatcctagccgaccgccaa

SEQ ID NO: 1944 - DNA, 38 bp, Artificial Sequence
  Synthetic oligonucleotide
gtgcgcgttggtgggccgcttgtaactataccctttga

SEQ ID NO: 1945 - DNA, 35 bp, Artificial Sequence
  Synthetic oligonucleotide
gttttggtggttcaaaccggtcgcccactggcatt

SEQ ID NO: 1946 - DNA, 36 bp, Artificial Sequence
  Synthetic oligonucleotide
tacatcccggctagatccgtgaggactggcggtgtc

SEQ ID NO: 1947 - DNA, 38 bp, Artificial Sequence
  Synthetic oligonucleotide
taaaagaactcttttcgtcaaccatacctcaggcctga

SEQ ID NO: 1948 - DNA, 37 bp, Artificial Sequence
  Synthetic oligonucleotide
tagtccatatatagcttaaactgatgcgggggttcga

SEQ ID NO: 1949 - DNA, 35 bp, Artificial Sequence
  Synthetic oligonucleotide
tacccttatcggcacccccacacttatggtaattc

SEQ ID NO: 1950 - DNA, 36 bp, Artificial Sequence
  Synthetic oligonucleotide
tacgggaatgggtttggccctaaaagccagacacga

SEQ ID NO: 1951 - DNA, 36 bp, Artificial Sequence
  Synthetic oligonucleotide
tagctaacggtcccaacaagcatgttgggattggca

SEQ ID NO: 1952 - DNA, 38 bp, Artificial Sequence
  Synthetic oligonucleotide
tacgccatgatacttacatctagccaccttttttttga

SEQ ID NO: 1953 - DNA, 36 bp, Artificial Sequence
  Synthetic oligonucleotide
tatatctggccaccggcgggggggctggtgatctta

SEQ ID NO: 1954 - DNA, 36 bp, Artificial Sequence; identical to SEQ ID NO: 1720
  Synthetic oligonucleotide

SEQ ID NO: 1955 - DNA, 38 bp, Artificial Sequence
  Synthetic oligonucleotide
tatcaaattcggtcgtagtatttgtcgccgtaacgtta

SEQ ID NO: 1956 - DNA, 38 bp, Artificial Sequence
  Synthetic oligonucleotide
tactagcgatcatttgttcgctttgggttggttattga

SEQ ID NO: 1957 - DNA, 35 bp, Artificial Sequence
  Synthetic oligonucleotide
taggtggtcgtgcctacattgactgtttccatcca

SEQ ID NO: 1958 - DNA, 35 bp, Artificial Sequence
  Synthetic oligonucleotide
tactccggcccaactatatacttctccacacctcc

SEQ ID NO: 1959 - DNA, 37 bp, Artificial Sequence
  Synthetic oligonucleotide
tatcacgacttcccaccttcttccgcctttgtcccaa

SEQ ID NO: 1960 - DNA, 37 bp, Artificial Sequence
  Synthetic oligonucleotide
tcacagggcctgaaggtagtagatattaaacgctgga

SEQ ID NO: 1961 - DNA, 35 bp, Artificial Sequence
  Synthetic oligonucleotide
tcattatacggatcccgcgccgaacctggccgact

SEQ ID NO: 1962 - DNA, 38 bp, Artificial Sequence
  Synthetic oligonucleotide
tcactttggtaaactattcccccgtttctctcctatga

SEQ ID NO: 1963 - DNA, 37 bp, Artificial Sequence
  Synthetic oligonucleotide
tcaatacgcgtccggaaatccccctgtgcaagctgga

SEQ ID NO: 1964 - DNA, 37 bp, Artificial Sequence
  Synthetic oligonucleotide
tcaatgcttgctgctcgtagctttcaaccgtggtgga

SEQ ID NO: 1965 - DNA, 35 bp, Artificial Sequence
  Synthetic oligonucleotide
tatcgtttgccatattccgccagagaaaagtctcc

SEQ ID NO: 1966 - DNA, 38 bp, Artificial Sequence
  Synthetic oligonucleotide
tcctcgtggcttaccggtatactcccccaactcattga

SEQ ID NO: 1967 - DNA, 37 bp, Artificial Sequence
  Synthetic oligonucleotide
tccctccccgttgcccttattccgtactcacttatga

SEQ ID NO: 1968 - DNA, 38 bp, Artificial Sequence
  Synthetic oligonucleotide
tcctgtctccgctaggtaacatccgaatactctcttga

SEQ ID NO: 1969 - DNA, 36 bp, Artificial Sequence
  Synthetic oligonucleotide
tcctcgaccatctacaaactttgaagccacacccca

SEQ ID NO: 1970 - DNA, 35 bp, Artificial Sequence; identical to SEQ ID NO: 1551
  Synthetic oligonucleotide

SEQ ID NO: 1971 - DNA, 38 bp, Artificial Sequence
  Synthetic oligonucleotide
tccactcaatccccggttcgtatgctctgtaccattga

SEQ ID NO: 1972 - DNA, 38 bp, Artificial Sequence
  Synthetic oligonucleotide
tcccgtcccacctttactttgctacttcaccatcttga

SEQ ID NO: 1973 - DNA, 38 bp, Artificial Sequence
  Synthetic oligonucleotide
tccttgcatacctcggctctcctttctctcacatttga

SEQ ID NO: 1974 - DNA, 37 bp, Artificial Sequence
  Synthetic oligonucleotide
tctcgtgcgcgatttctgttctagggtaggagaggga

SEQ ID NO: 1975 - DNA, 38 bp, Artificial Sequence
  Synthetic oligonucleotide
tcggctcatccaaaattacttgcgggtttcataaatga

SEQ ID NO: 1976 - DNA, 36 bp, Artificial Sequence
  Synthetic oligonucleotide
tctcgcacctttattttctccgctcttttgtttcca

SEQ ID NO: 1977 - DNA, 38 bp, Artificial Sequence
  Synthetic oligonucleotide
tcgctacaattggccttttctgtatttgggttctatga

SEQ ID NO: 1978 - DNA, 37 bp, Artificial Sequence
  Synthetic oligonucleotide
tgcacgccgagcaaggcggtactctaggacccacgga

SEQ ID NO: 1979 - DNA, 38 bp, Artificial Sequence
  Synthetic oligonucleotide
tgccgcttttaccacttgacttacgataagaaaactga

SEQ ID NO: 1980 - DNA, 37 bp, Artificial Sequence
  Synthetic oligonucleotide
tgagtttttctaaataccgcagcctcagccacgcgga

SEQ ID NO: 1981 - DNA, 34 bp, Artificial Sequence
  Synthetic oligonucleotide
tgccttttttttcaccggtttgattccgctttcg

SEQ ID NO: 1982 - DNA, 35 bp, Artificial Sequence
  Synthetic oligonucleotide
tgaaagccaggtattttggggctcctttttcctcc

SEQ ID NO: 1983 - DNA, 38 bp, Artificial Sequence
  Synthetic oligonucleotide
tgacctacaaagggtttgaaataaatcgctcgacgtga

SEQ ID NO: 1984 - DNA, 35 bp, Artificial Sequence
  Synthetic oligonucleotide
tggaaagttagatttcctggggtctcgctttgagt

SEQ ID NO: 1985 - DNA, 35 bp, Artificial Sequence
  Synthetic oligonucleotide
tgtacttacttttactcgatcaccttataatttcc

SEQ ID NO: 1986 - DNA, 38 bp, Artificial Sequence
  Synthetic oligonucleotide
tggcctattctcgtacaatttacttcttatcatcctga

SEQ ID NO: 1987 - DNA, 38 bp, Artificial Sequence
  Synthetic oligonucleotide
ttagtacgtgccgagccccgagccctagagacctgtga

SEQ ID NO: 1988 - DNA, 36 bp, Artificial Sequence; identical to SEQ ID NO: 1730
  Synthetic oligonucleotide

SEQ ID NO: 1989 - DNA, 35 bp, Artificial Sequence
  Synthetic oligonucleotide
tgttagttccactttccgataatccgtcttcctta

SEQ ID NO: 1990 - DNA, 36 bp, Artificial Sequence
  Synthetic oligonucleotide
tgttaggcctttatttaccttatcttaattgtttta

SEQ ID NO: 1991 - DNA, 38 bp, Artificial Sequence
  Synthetic oligonucleotide
tgtttttacacgcctactttttatctatctccacatga

SEQ ID NO: 1992 - DNA, 38 bp, Artificial Sequence
  Synthetic oligonucleotide
ttccccttttatttgcccgtaataatcgcttgacatga

SEQ ID NO: 1993 - DNA, 38 bp, Artificial Sequence
  Synthetic oligonucleotide
ttgaacctcggtagagccgtaaggcctatccggtttga

SEQ ID NO: 1994 - DNA, 37 bp, Artificial Sequence
  Synthetic oligonucleotide
ttcgacccttttccatacttcttctcacgcaaattga

SEQ ID NO: 1995 - DNA, 35 bp, Artificial Sequence
  Synthetic oligonucleotide
ttcttaatgtaaacttttgttgatactgtgccacc

SEQ ID NO: 1996 - DNA, 36 bp, Artificial Sequence
  Synthetic oligonucleotide
ttcccctctactcgcctattttcctcataaaattta

SEQ ID NO: 1997 - DNA, 35 bp, Artificial Sequence
  Synthetic oligonucleotide
ttcctcccccccgtgcaattttagaggtcccgtgg

SEQ ID NO: 1998 - DNA, 35 bp, Artificial Sequence
  Synthetic oligonucleotide
ttctcaccgtacatcccttacctatccccttttat

SEQ ID NO: 1999 - DNA, 38 bp, Artificial Sequence; identical to SEQ ID NO: 1804
  Synthetic oligonucleotide

SEQ ID NO: 2000 - DNA, 36 bp, Artificial Sequence
  Synthetic oligonucleotide
tttgcgaatctagctttcctgtatacatgacaataa

SEQ ID NO: 2001 - DNA, 35 bp, Artificial Sequence
  Synthetic oligonucleotide
ttggtctattatgctctatatgtgaagtgcgaaaa

SEQ ID NO: 2002 - DNA, 35 bp, Artificial Sequence
  Synthetic oligonucleotide
ttttagttccactttccgataatccgccttcctta

SEQ ID NO: 2003 - DNA, 35 bp, Artificial Sequence
  Synthetic oligonucleotide
ttttagtatacccaccgcgatactctcagtcttgc

SEQ ID NO: 2004 - DNA, 38 bp, Artificial Sequence
  Synthetic oligonucleotide
ttttggcgtgagctccaggtagtggttgaaacccatga

SEQ ID NO: 2005 - DNA, 37 bp, Artificial Sequence
  Synthetic oligonucleotide
agttcgccgttggaggctctttcgacatcatgctaga

SEQ ID NO: 2006 - DNA, 36 bp, Artificial Sequence; identical to SEQ ID NO: 1586
  Synthetic oligonucleotide

SEQ ID NO: 2007 - DNA, 35 bp, Artificial Sequence
  Synthetic oligonucleotide
aaagcgatcacgtttctttgggctgctgtctagca

SEQ ID NO: 2008 - DNA, 36 bp, Artificial Sequence
  Synthetic oligonucleotide
ccattaacggtaagacttaattccgtttggcgtgta

SEQ ID NO: 2009 - DNA, 37 bp, Artificial Sequence; identical to SEQ ID NO: 1587
  Synthetic oligonucleotide

SEQ ID NO: 2010 - DNA, 36 bp, Artificial Sequence
  Synthetic oligonucleotide
aatcgtactcacggtgacatccttggtttgatggta

SEQ ID NO: 2011 - DNA, 36 bp, Artificial Sequence; identical to SEQ ID NO: 1590
  Synthetic oligonucleotide

SEQ ID NO: 2012 - DNA, 38 bp, Artificial Sequence
  Synthetic oligonucleotide
gagttttactgccgtgtcaattatcggtcctgtgttga

SEQ ID NO: 2013 - DNA, 38 bp, Artificial Sequence
  Synthetic oligonucleotide
cgggacgaatcttagtttattccattcgcaagtgctga

SEQ ID NO: 2014 - DNA, 35 bp, Artificial Sequence
  Synthetic oligonucleotide
gatcataccgcgatatagacattgcaccgtttcta

SEQ ID NO: 2015 - DNA, 35 bp, Artificial Sequence; identical to SEQ ID NO: 1591
  Synthetic oligonucleotide

SEQ ID NO: 2016 - DNA, 38 bp, Artificial Sequence
  Synthetic oligonucleotide
agggacgaatcttagtttattccattcgcaagtgctga

SEQ ID NO: 2017 - DNA, 38 bp, Artificial Sequence
  Synthetic oligonucleotide
atcgcttaagttccgtaagggttaaggttcgttattga

SEQ ID NO: 2018 - DNA, 35 bp, Artificial Sequence
  Synthetic oligonucleotide
gagtacgcgcaatgacaatcgacttgttttcggtc

SEQ ID NO: 2019 - DNA, 37 bp, Artificial Sequence; identical to SEQ ID NO: 1595
  Synthetic oligonucleotide

SEQ ID NO: 2020 - DNA, 36 bp, Artificial Sequence
  Synthetic oligonucleotide
cctcagtttacgtactcatcttgaatgggggaaata

SEQ ID NO: 2021 - DNA, 38 bp, Artificial Sequence; identical to SEQ ID NO: 1596
  Synthetic oligonucleotide

SEQ ID NO: 2022 - DNA, 35 bp, Artificial Sequence; identical to SEQ ID NO: 1597
  Synthetic oligonucleotide

SEQ ID NO: 2023 - DNA, 38 bp, Artificial Sequence
  Synthetic oligonucleotide
agattaggttgctctgtcccgtgcttaagtatcgctga

SEQ ID NO: 2024 - DNA, 38 bp, Artificial Sequence
  Synthetic oligonucleotide
acattttccgcatgggacggaatgttcttcttcattga

SEQ ID NO: 2025 - DNA, 36 bp, Artificial Sequence; identical to SEQ ID NO: 1750
  Synthetic oligonucleotide

SEQ ID NO: 2026 - DNA, 36 bp, Artificial Sequence; identical to SEQ ID NO: 1598
  Synthetic oligonucleotide

SEQ ID NO: 2027 - DNA, 35 bp, Artificial Sequence; identical to SEQ ID NO: 1426
  Synthetic oligonucleotide

SEQ ID NO: 2028 - DNA, 35 bp, Artificial Sequence
  Synthetic oligonucleotide
tacctcatgtttgtcactatggaaatcatcccgcc

SEQ ID NO: 2029 - DNA, 35 bp, Artificial Sequence
  Synthetic oligonucleotide
tgcttctgcatgcaacgtgctctggactagctgtc

SEQ ID NO: 2030 - DNA, 35 bp, Artificial Sequence; identical to SEQ ID NO: 1599
  Synthetic oligonucleotide

SEQ ID NO: 2031 - DNA, 37 bp, Artificial Sequence; identical to SEQ ID NO: 1650
  Synthetic oligonucleotide

SEQ ID NO: 2032 - DNA, 36 bp, Artificial Sequence; identical to SEQ ID NO: 1638
  Synthetic oligonucleotide

SEQ ID NO: 2033 - DNA, 37 bp, Artificial Sequence; identical to SEQ ID NO: 1649
  Synthetic oligonucleotide

SEQ ID NO: 2034 - DNA, 38 bp, Artificial Sequence; identical to SEQ ID NO: 1601
  Synthetic oligonucleotide

SEQ ID NO: 2035 - DNA, 36 bp, Artificial Sequence; identical to SEQ ID NO: 1602
  Synthetic oligonucleotide

SEQ ID NO: 2036 - DNA, 36 bp, Artificial Sequence; identical to SEQ ID NO: 1603
  Synthetic oligonucleotide

SEQ ID NO: 2037 - DNA, 36 bp, Artificial Sequence
  Synthetic oligonucleotide
ttggcctttgagttagtgcctagatagcctgagtta

SEQ ID NO: 2038 - DNA, 36 bp, Artificial Sequence
  Synthetic oligonucleotide
tcattggttccgatccggggctctggacctgacata

SEQ ID NO: 2039 - DNA, 36 bp, Artificial Sequence; identical to SEQ ID NO: 1604
  Synthetic oligonucleotide

SEQ ID NO: 2040 - DNA, 35 bp, Artificial Sequence; identical to SEQ ID NO: 1605
  Synthetic oligonucleotide

SEQ ID NO: 2041 - DNA, 36 bp, Artificial Sequence
  Synthetic oligonucleotide
gcggagcgcttatataatggtgttgtaggtccatta

SEQ ID NO: 2042 - DNA, 35 bp, Artificial Sequence
  Synthetic oligonucleotide
gtacgccgctgccaataatgtctgttgttacattc

SEQ ID NO: 2043 - DNA, 36 bp, Artificial Sequence
  Synthetic oligonucleotide
tttaatggggagctacgtctcgaatcgattttggta

SEQ ID NO: 2044 - DNA, 35 bp, Artificial Sequence; identical to SEQ ID NO: 1606
  Synthetic oligonucleotide

SEQ ID NO: 2045 - DNA, 35 bp, Artificial Sequence
  Synthetic oligonucleotide
ttcccttgttcgagtttcccagcctggacgccctg

SEQ ID NO: 2046 - DNA, 36 bp, Artificial Sequence
  Synthetic oligonucleotide
tccctgtcggtccaaacgtaagggcgggctaaaaca

SEQ ID NO: 2047 - DNA, 36 bp, Artificial Sequence
  Synthetic oligonucleotide
gtctggctggaaaatcagggttgcctatgtttcaaa

SEQ ID NO: 2048 - DNA, 36 bp, Artificial Sequence
  Synthetic oligonucleotide
tacattccgggctgttcagcaatgtcgctccagtta

SEQ ID NO: 2049 - DNA, 38 bp, Artificial Sequence; identical to SEQ ID NO: 1609
  Synthetic oligonucleotide

SEQ ID NO: 2050 - DNA, 35 bp, Artificial Sequence
  Synthetic oligonucleotide
tttgcaagttcgctccgtatatccactgtgaagac

SEQ ID NO: 2051 - DNA, 35 bp, Artificial Sequence
  Synthetic oligonucleotide
tttgcaagttcgctccgtatatccactgtgaagcc

SEQ ID NO: 2052 - DNA, 36 bp, Artificial Sequence
  Synthetic oligonucleotide
tcctctccgtctgtgaagacgtgtgtggcggaatta

SEQ ID NO: 2053 - DNA, 35 bp, Artificial Sequence; identical to SEQ ID NO: 1644
  Synthetic oligonucleotide

SEQ ID NO: 2054 - DNA, 36 bp, Artificial Sequence; identical to SEQ ID NO: 1611
  Synthetic oligonucleotide

SEQ ID NO: 2055 - DNA, 37 bp, Artificial Sequence
  Synthetic oligonucleotide
aaccaaacctgtacccgaataaatcatccattaacga

SEQ ID NO: 2056 - DNA, 36 bp, Artificial Sequence
  Synthetic oligonucleotide
aacccaattcacatactctctcaccctcactaaaca

SEQ ID NO: 2057 - DNA, 37 bp, Artificial Sequence
  Synthetic oligonucleotide
aacaacctcgaatttgtataggttcgcatcactctga

SEQ ID NO: 2058 - DNA, 35 bp, Artificial Sequence
  Synthetic oligonucleotide
aactgtcatccgctgactaactcaatctaactcca

SEQ ID NO: 2059 - DNA, 38 bp, Artificial Sequence
  Synthetic oligonucleotide
acattaaggatttatcttcacccatttttgcctcttga

SEQ ID NO: 2060 - DNA, 38 bp, Artificial Sequence
  Synthetic oligonucleotide
acaaagtaacgtacctcagttccggtacttacgggtga

SEQ ID NO: 2061 - DNA, 35 bp, Artificial Sequence
  Synthetic oligonucleotide
accccacctgcacaccttcatctcatctattacat

SEQ ID NO: 2062 - DNA, 38 bp, Artificial Sequence; identical to SEQ ID NO: 2024
  Synthetic oligonucleotide

SEQ ID NO: 2063 - DNA, 37 bp, Artificial Sequence
  Synthetic oligonucleotide
acaattaatataaattccttacatcaatcctagacga

SEQ ID NO: 2064 - DNA, 38 bp, Artificial Sequence
  Synthetic oligonucleotide
acattcccgtggtggtccttacgggtgggccagcctga

SEQ ID NO: 2065 - DNA, 38 bp, Artificial Sequence; identical to SEQ ID NO: 1612
  Synthetic oligonucleotide

SEQ ID NO: 2066 - DNA, 35 bp, Artificial Sequence
  Synthetic oligonucleotide
accggactgcacagggatcccgataggagggtgac

SEQ ID NO: 2067 - DNA, 37 bp, Artificial Sequence
  Synthetic oligonucleotide
acccttgcaatcaatccccccttttacctgtacatga

SEQ ID NO: 2068 - DNA, 36 bp, Artificial Sequence
  Synthetic oligonucleotide
actcgcccttcacgactttatccaaatttactttca

SEQ ID NO: 2069 - DNA, 35 bp, Artificial Sequence
  Synthetic oligonucleotide
acgtctgccaaatctactcgcattcgatacacaca

SEQ ID NO: 2070 - DNA, 35 bp, Artificial Sequence
  Synthetic oligonucleotide
actactgggcgcactagcgcgaggctccactgaat

SEQ ID NO: 2071 - DNA, 38 bp, Artificial Sequence
  Synthetic oligonucleotide
actcacattcccaccccctattgcctttaaatacctga

SEQ ID NO: 2072 - DNA, 37 bp, Artificial Sequence
  Synthetic oligonucleotide
actgcagcatcaagccactaattggggcttgtatcga

SEQ ID NO: 2073 - DNA, 37 bp, Artificial Sequence
  Synthetic oligonucleotide
acggttggagcttgtgggaaactaggttgggttcgga

SEQ ID NO: 2074 - DNA, 35 bp, Artificial Sequence; identical to SEQ ID NO: 1597
  Synthetic oligonucleotide

SEQ ID NO: 2075 - DNA, 35 bp, Artificial Sequence
  Synthetic oligonucleotide
agcacccacccgcttctattcctcgatcatacact

SEQ ID NO: 2076 - DNA, 35 bp, Artificial Sequence; identical to SEQ ID NO: 1591
  Synthetic oligonucleotide

SEQ ID NO: 2077 - DNA, 36 bp, Artificial Sequence; identical to SEQ ID NO: 1590
  Synthetic oligonucleotide

SEQ ID NO: 2078 - DNA, 35 bp, Artificial Sequence
  Synthetic oligonucleotide
agattgctccgcagtacggtgtagggcgataaaaa

SEQ ID NO: 2079 - DNA, 35 bp, Artificial Sequence
  Synthetic oligonucleotide
agccgcccctttagacagaggttacgacttgcgta

SEQ ID NO: 2080 - DNA, 38 bp, Artificial Sequence
  Synthetic oligonucleotide
actttggggctttctcggtcttcgcactatggtactga

SEQ ID NO: 2081 - DNA, 36 bp, Artificial Sequence; identical to SEQ ID NO: 1617
  Synthetic oligonucleotide

SEQ ID NO: 2082 - DNA, 36 bp, Artificial Sequence
  Synthetic oligonucleotide
agaaccccattctcattccaccagttactacgctta

SEQ ID NO: 2083 - DNA, 36 bp, Artificial Sequence
  Synthetic oligonucleotide
aggtatacaaatgtgtagtctagtcctgccgatcga

SEQ ID NO: 2084 - DNA, 36 bp, Artificial Sequence; identical to SEQ ID NO: 1586
  Synthetic oligonucleotide

SEQ ID NO: 2085 - DNA, 36 bp, Artificial Sequence
  Synthetic oligonucleotide
agggattcgccctgtgtcacgctcaaactgtagtaa

SEQ ID NO: 2086 - DNA, 38 bp, Artificial Sequence
  Synthetic oligonucleotide
agtaatccccggcgtataatttcagtcctgtggtttga

SEQ ID NO: 2087 - DNA, 35 bp, Artificial Sequence
  Synthetic oligonucleotide
agttgatgcagtgggacctgagattaggcttatga

SEQ ID NO: 2088 - DNA, 36 bp, Artificial Sequence
  Synthetic oligonucleotide
agtattcctctggtagtatttttccttaattccgta

SEQ ID NO: 2089 - DNA, 35 bp, Artificial Sequence; identical to SEQ ID NO: 1620
  Synthetic oligonucleotide

SEQ ID NO: 2090 - DNA, 35 bp, Artificial Sequence
  Synthetic oligonucleotide
agtacctcttgtgggtcttggggctgccactgcct

SEQ ID NO: 2091 - DNA, 36 bp, Artificial Sequence
  Synthetic oligonucleotide
atcaccgtccttatcataaccagttcgttttttata

SEQ ID NO: 2092 - DNA, 36 bp, Artificial Sequence
  Synthetic oligonucleotide
atgcttccatctctgttttttaaccccttaccgtta

SEQ ID NO: 2093 - DNA, 35 bp, Artificial Sequence; identical to SEQ ID NO: 1594
  Synthetic oligonucleotide

SEQ ID NO: 2094 - DNA, 37 bp, Artificial Sequence
  Synthetic oligonucleotide
caccctaatcaccgctaaccttaccataacaatttga

SEQ ID NO: 2095 - DNA, 37 bp, Artificial Sequence
  Synthetic oligonucleotide
cagccgctctagttacaggtttactgcggctaaacga

SEQ ID NO: 2096 - DNA, 35 bp, Artificial Sequence
  Synthetic oligonucleotide
cacagtatccttgtacagattttgatggttgttgg

SEQ ID NO: 2097 - DNA, 35 bp, Artificial Sequence
  Synthetic oligonucleotide
catcggggtacgcttcctttaaaagatcctgtgcc

SEQ ID NO: 2098 - DNA, 36 bp, Artificial Sequence
  Synthetic oligonucleotide
attcatggtgccgtgagaaaataaccatgtacgcaa

SEQ ID NO: 2099 - DNA, 35 bp, Artificial Sequence
  Synthetic oligonucleotide
atttccataccattgtaggccttctcgtatcgtaa

SEQ ID NO: 2100 - DNA, 38 bp, Artificial Sequence
  Synthetic oligonucleotide
cccatagggcactttttacacccctcgcatactattga

SEQ ID NO: 2101 - DNA, 37 bp, Artificial Sequence
  Synthetic oligonucleotide
ccgtgatgcagatgaatgtacggacgtctgccggtga

SEQ ID NO: 2102 - DNA, 38 bp, Artificial Sequence
  Synthetic oligonucleotide
cccaccgagggcaggtggtgacgtttccccagccttga

SEQ ID NO: 2103 - DNA, 38 bp, Artificial Sequence
  Synthetic oligonucleotide
cccagacaactaccgcggagtagcggaagccgtactga

SEQ ID NO: 2104 - DNA, 36 bp, Artificial Sequence
  Synthetic oligonucleotide
ccgcgcatcacattgggctctgggatgcccgctgca

SEQ ID NO: 2105 - DNA, 35 bp, Artificial Sequence
  Synthetic oligonucleotide
cctagaccacgtgtgtgtcccgggtagggaagtct

SEQ ID NO: 2106 - DNA, 37 bp, Artificial Sequence; identical to SEQ ID NO: 1587
  Synthetic oligonucleotide

SEQ ID NO: 2107 - DNA, 36 bp, Artificial Sequence; identical to SEQ ID NO: 2008
  Synthetic oligonucleotide

SEQ ID NO: 2108 - DNA, 37 bp, Artificial Sequence
  Synthetic oligonucleotide
ccccaccgcgcacaccccgaactttacatatgcatga

SEQ ID NO: 2109 - DNA, 38 bp, Artificial Sequence
  Synthetic oligonucleotide
ccacacccattttgactgaacagcctatccggtactga

SEQ ID NO: 2110 - DNA, 36 bp, Artificial Sequence
  Synthetic oligonucleotide
cctgttcaattcatcctccaggttcgtgttacccta

SEQ ID NO: 2111 - DNA, 36 bp, Artificial Sequence
  Synthetic oligonucleotide
cctttcggactagcttctggcccatttggcgccata

SEQ ID NO: 2112 - DNA, 35 bp, Artificial Sequence
  Synthetic oligonucleotide
ctacaattagaagctcggtttcttctgcggtgacg

SEQ ID NO: 2113 - DNA, 38 bp, Artificial Sequence; identical to SEQ ID NO: 1596
  Synthetic oligonucleotide

SEQ ID NO: 2114 - DNA, 35 bp, Artificial Sequence
  Synthetic oligonucleotide
cgcgggggcctatatgctgtttccaccgctagtta

SEQ ID NO: 2115 - DNA, 35 bp, Artificial Sequence
  Synthetic oligonucleotide
cgctggctgcacgcacgcctgggcgcactgcccta

SEQ ID NO: 2116 - DNA, 35 bp, Artificial Sequence
  Synthetic oligonucleotide
cgtataggttaatacgtactggagcccggagggga

SEQ ID NO: 2117 - DNA, 37 bp, Artificial Sequence
  Synthetic oligonucleotide
cctgaatgggcggtccgcacttcgttagtatcccaga

SEQ ID NO: 2118 - DNA, 35 bp, Artificial Sequence
  Synthetic oligonucleotide
ctcaacgtagtctgcggagttactccagaatgacg

SEQ ID NO: 2119 - DNA, 38 bp, Artificial Sequence
  Synthetic oligonucleotide
gaacttcgcggtgactcgtgcccttcgttgtcctttga

SEQ ID NO: 2120 - DNA, 35 bp, Artificial Sequence
  Synthetic oligonucleotide
gaaccatcattggcttcatttagctattctacacc

SEQ ID NO: 2121 - DNA, 38 bp, Artificial Sequence
  Synthetic oligonucleotide
ctgtccttaaatggaaggtcattttggctcaggtctga

SEQ ID NO: 2122 - DNA, 37 bp, Artificial Sequence
  Synthetic oligonucleotide
gacacgggggcaaaggtggtttgtgtaccccgtacga

SEQ ID NO: 2123 - DNA, 37 bp, Artificial Sequence
  Synthetic oligonucleotide
gaaggtcatcggactgttctgtcaatccccctttgga

SEQ ID NO: 2124 - DNA, 35 bp, Artificial Sequence
  Synthetic oligonucleotide
gagctcaaatcggggactactgcattgtctactcg

SEQ ID NO: 2125 - DNA, 37 bp, Artificial Sequence; identical to SEQ ID NO: 1595
  Synthetic oligonucleotide

SEQ ID NO: 2126 - DNA, 38 bp, Artificial Sequence
  Synthetic oligonucleotide
gacgccttgaaagcgacgcctgatactcgggggcctga

SEQ ID NO: 2127 - DNA, 37 bp, Artificial Sequence
  Synthetic oligonucleotide
gagggccccaagtcaccgctgtagttctaggcccaga

SEQ ID NO: 2128 - DNA, 35 bp, Artificial Sequence
  Synthetic oligonucleotide
gacggtcgtactggagcatcctgagactgttcgag

SEQ ID NO: 2129 - DNA, 37 bp, Artificial Sequence; identical to SEQ ID NO: 1767
  Synthetic oligonucleotide

SEQ ID NO: 2130 - DNA, 35 bp, Artificial Sequence
  Synthetic oligonucleotide
gagtacaggtccggcgccctatcgagaaaggaaaa

SEQ ID NO: 2131 - DNA, 38 bp, Artificial Sequence
  Synthetic oligonucleotide
gagtactgccatgaggccagaggtaagaagccgaatga

SEQ ID NO: 2132 - DNA, 35 bp, Artificial Sequence
  Synthetic oligonucleotide
gagtacagttggattccgcccttgtatctgtacga

SEQ ID NO: 2133 - DNA, 37 bp, Artificial Sequence
  Synthetic oligonucleotide
gagtacctacccgtcgaatattgagattcgggaacga

SEQ ID NO: 2134 - DNA, 35 bp, Artificial Sequence
  Synthetic oligonucleotide
gagtctcatacccctgaatatgtttttatgctttc

SEQ ID NO: 2135 - DNA, 36 bp, Artificial Sequence
  Synthetic oligonucleotide
gagtggctcaaccagggtccagaattacaaaaaata

SEQ ID NO: 2136 - DNA, 36 bp, Artificial Sequence
  Synthetic oligonucleotide
gcaatgtcccctgttttctactaactctgatcttga

SEQ ID NO: 2137 - DNA, 36 bp, Artificial Sequence
  Synthetic oligonucleotide
gcagttctaaaggtggaagaatccaaatgacccaga

SEQ ID NO: 2138 - DNA, 35 bp, Artificial Sequence
  Synthetic oligonucleotide
gcaccttctcctttaattcccagccaataaccatc

SEQ ID NO: 2139 - DNA, 36 bp, Artificial Sequence
  Synthetic oligonucleotide
gatgtaacgggtctgcggggagtttgtcatgcggga

SEQ ID NO: 2140 - DNA, 35 bp, Artificial Sequence
  Synthetic oligonucleotide
gccatcatattcattattccatgcctccccatccc

SEQ ID NO: 2141 - DNA, 35 bp, Artificial Sequence; identical to SEQ ID NO: 2014
  Synthetic oligonucleotide

SEQ ID NO: 2142 - DNA, 36 bp, Artificial Sequence
  Synthetic oligonucleotide
gcaatgaacacctacacatacctgccttcacgatta

SEQ ID NO: 2143 - DNA, 36 bp, Artificial Sequence
  Synthetic oligonucleotide
gccctcacttcaacgtttcataactctacattaata

SEQ ID NO: 2144 - DNA, 38 bp, Artificial Sequence
  Synthetic oligonucleotide
gcgccgatggggcatcggtcgcgacagtcccgccgtga

SEQ ID NO: 2145 - DNA, 36 bp, Artificial Sequence
  Synthetic oligonucleotide
gcgttccccttggacaatatcactttcttatcgtaa

SEQ ID NO: 2146 - DNA, 35 bp, Artificial Sequence; identical to SEQ ID NO: 1600
  Synthetic oligonucleotide

SEQ ID NO: 2147 - DNA, 36 bp, Artificial Sequence
  Synthetic oligonucleotide
gcctctgccaagcaattcatcttaacgacctctcta

SEQ ID NO: 2148 - DNA, 35 bp, Artificial Sequence
  Synthetic oligonucleotide
gccgccggagcacggctgtctttatacgcactgta

SEQ ID NO: 2149 - DNA, 36 bp, Artificial Sequence; identical to SEQ ID NO: 2041
  Synthetic oligonucleotide

SEQ ID NO: 2150 - DNA, 38 bp, Artificial Sequence
  Synthetic oligonucleotide
gcgtacatagatctaggctttccatccaggatatgtga

SEQ ID NO: 2151 - DNA, 36 bp, Artificial Sequence
  Synthetic oligonucleotide
gcgccggcatactccttatattccactatccctgta

SEQ ID NO: 2152 - DNA, 38 bp, Artificial Sequence
  Synthetic oligonucleotide
gctaacgtactctttttttcaacttcactgactattga

SEQ ID NO: 2153 - DNA, 38 bp, Artificial Sequence
  Synthetic oligonucleotide
gctcccgaattgttttcctattaatcgttttcccatga

SEQ ID NO: 2154 - DNA, 36 bp, Artificial Sequence
  Synthetic oligonucleotide
gctgaacaggtcacggtcccccccacacgttaacta

SEQ ID NO: 2155 - DNA, 37 bp, Artificial Sequence
  Synthetic oligonucleotide
gctatacgactgcaagggtctgaccgcagggaattga

SEQ ID NO: 2156 - DNA, 36 bp, Artificial Sequence
  Synthetic oligonucleotide
gcttccgtatcaagagtggctcgcacccacagagta

SEQ ID NO: 2157 - DNA, 35 bp, Artificial Sequence
  Synthetic oligonucleotide
ggattacgtacccgactttttttctggttttcttt

SEQ ID NO: 2158 - DNA, 36 bp, Artificial Sequence
  Synthetic oligonucleotide
gggaccggaccctgtccttggtcgtttgatccacga

SEQ ID NO: 2159 - DNA, 38 bp, Artificial Sequence
  Synthetic oligonucleotide
ggtatttttttgtgctaatctcgccgaatcgtacctga

SEQ ID NO: 2160 - DNA, 36 bp, Artificial Sequence
  Synthetic oligonucleotide
ggctcaccgactccttactttgctggtactacctta

SEQ ID NO: 2161 - DNA, 37 bp, Artificial Sequence
  Synthetic oligonucleotide
gggaacgtaaggttttggtgaacagagggtagtaaga

SEQ ID NO: 2162 - DNA, 38 bp, Artificial Sequence
  Synthetic oligonucleotide
ggtgcttgtccctgtctctacgtaacttttgaagttga

SEQ ID NO: 2163 - DNA, 38 bp, Artificial Sequence; identical to SEQ ID NO: 1601
  Synthetic oligonucleotide

SEQ ID NO: 2164 - DNA, 35 bp, Artificial Sequence
  Synthetic oligonucleotide
ggggtccttttccatcacacatgtccagttccgta

SEQ ID NO: 2165 - DNA, 35 bp, Artificial Sequence
  Synthetic oligonucleotide
ggccttcttaccgactggggcttcgggttttacgt

SEQ ID NO: 2166 - DNA, 37 bp, Artificial Sequence
  Synthetic oligonucleotide
gtgggcccgcattgaaaccgcattcgtagagcctgga

SEQ ID NO: 2167 - DNA, 35 bp, Artificial Sequence; identical to SEQ ID NO: 2042
  Synthetic oligonucleotide

SEQ ID NO: 2168 - DNA, 37 bp, Artificial Sequence
  Synthetic oligonucleotide
gtacttgccgggttacgcagcgcgtccctcttcgcga

SEQ ID NO: 2169 - DNA, 37 bp, Artificial Sequence
  Synthetic oligonucleotide
gtgagctttacgtaatgcggtagttcgtactaacgga

SEQ ID NO: 2170 - DNA, 36 bp, Artificial Sequence; identical to SEQ ID NO: 1598
  Synthetic oligonucleotide

SEQ ID NO: 2171 - DNA, 38 bp, Artificial Sequence
  Synthetic oligonucleotide
gtcgcctatcccagtgcttcgaggggcgacgtgtctga

SEQ ID NO: 2172 - DNA, 37 bp, Artificial Sequence
  Synthetic oligonucleotide
gtgtacatttccgcgcaagctactcagttttttttga

SEQ ID NO: 2173 - DNA, 35 bp, Artificial Sequence
  Synthetic oligonucleotide
gtttactcctgtaccgtgaggtgaagggaaagcaa

SEQ ID NO: 2174 - DNA, 36 bp, Artificial Sequence; identical to SEQ ID NO: 2048
  Synthetic oligonucleotide

SEQ ID NO: 2175 - DNA, 37 bp, Artificial Sequence
  Synthetic oligonucleotide
gttttttactatggttcatctaggattccagtttaga

SEQ ID NO: 2176 - DNA, 36 bp, Artificial Sequence
  Synthetic oligonucleotide
gttctttcacggacggcctcctttccgatctattca

SEQ ID NO: 2177 - DNA, 36 bp, Artificial Sequence; identical to SEQ ID NO: 1602
  Synthetic oligonucleotide

SEQ ID NO: 2178 - DNA, 37 bp, Artificial Sequence
  Synthetic oligonucleotide
gttccgggctctttgtgtagtggtgagcacggcacga

SEQ ID NO: 2179 - DNA, 37 bp, Artificial Sequence
  Synthetic oligonucleotide
taaatgcccggttcattgaatcttcacaaagatggga

SEQ ID NO: 2180 - DNA, 36 bp, Artificial Sequence; identical to SEQ ID NO: 1603
  Synthetic oligonucleotide

SEQ ID NO: 2181 - DNA, 38 bp, Artificial Sequence
  Synthetic oligonucleotide
tacaccatgatacttacatctagcaaccttttttttga

SEQ ID NO: 2182 - DNA, 35 bp, Artificial Sequence
  Synthetic oligonucleotide
taaccgttcgctgggttccagtcccttgttaagcc

SEQ ID NO: 2183 - DNA, 36 bp, Artificial Sequence
  Synthetic oligonucleotide
tagtgttaaacgtgagtgcacttaatcaccctggta

SEQ ID NO: 2184 - DNA, 36 bp, Artificial Sequence
  Synthetic oligonucleotide
taccttgacctgcatcggttctcttcataatcctaa

SEQ ID NO: 2185 - DNA, 38 bp, Artificial Sequence
  Synthetic oligonucleotide
tagtcctgcactgttttacagttcttggtaatatttga

SEQ ID NO: 2186 - DNA, 35 bp, Artificial Sequence
  Synthetic oligonucleotide
tacttcaacacctcgctcgttacataccaatttct

SEQ ID NO: 2187 - DNA, 36 bp, Artificial Sequence; identical to SEQ ID NO: 1638
  Synthetic oligonucleotide

SEQ ID NO: 2188 - DNA, 35 bp, Artificial Sequence
  Synthetic oligonucleotide
tcatcgtcgcgtggccggtaggctgggaaatcctg

SEQ ID NO: 2189 - DNA, 37 bp, Artificial Sequence
  Synthetic oligonucleotide
tcacggatgcgaatcaaatgaactacctaagtccgga

SEQ ID NO: 2190 - DNA, 36 bp, Artificial Sequence; identical to SEQ ID NO: 2038
  Synthetic oligonucleotide

SEQ ID NO: 2191 - DNA, 35 bp, Artificial Sequence; identical to SEQ ID NO: 1777
  Synthetic oligonucleotide

SEQ ID NO: 2192 - DNA, 37 bp, Artificial Sequence
  Synthetic oligonucleotide
tccagccacatggatgaacagtgggccttttcacgga

SEQ ID NO: 2193 - DNA, 37 bp, Artificial Sequence; identical to SEQ ID NO: 1639
  Synthetic oligonucleotide

SEQ ID NO: 2194 - DNA, 38 bp, Artificial Sequence
  Synthetic oligonucleotide
tccttccgacgataacttacgtgtgacacgcgtactga

SEQ ID NO: 2195 - DNA, 38 bp, Artificial Sequence; identical to SEQ ID NO: 1608
  Synthetic oligonucleotide

SEQ ID NO: 2196 - DNA, 38 bp, Artificial Sequence
  Synthetic oligonucleotide
tcccgagtttgtcgatctcgagtggggcccttacctga

SEQ ID NO: 2197 - DNA, 36 bp, Artificial Sequence
  Synthetic oligonucleotide
tccctgtaacagggtctctctctttatatattctca

SEQ ID NO: 2198 - DNA, 37 bp, Artificial Sequence
  Synthetic oligonucleotide
tcgttcctcctttcgggtccgtgaggatccggaacga

SEQ ID NO: 2199 - DNA, 36 bp, Artificial Sequence; identical to SEQ ID NO: 1604
  Synthetic oligonucleotide

SEQ ID NO: 2200 - DNA, 37 bp, Artificial Sequence
  Synthetic oligonucleotide
tctcctttccaacgggacgctgtgttcccctcagtga

SEQ ID NO: 2201 - DNA, 35 bp, Artificial Sequence
  Synthetic oligonucleotide
tctgcactaccgtgaggtatggtgataggtggcga

SEQ ID NO: 2202 - DNA, 36 bp, Artificial Sequence
  Synthetic oligonucleotide
tcgggccagatcgcattcgtagttgctgtttccgta

SEQ ID NO: 2203 - DNA, 37 bp, Artificial Sequence
  Synthetic oligonucleotide
tgcacttaattccacttttccacccttttcactttga

SEQ ID NO: 2204 - DNA, 37 bp, Artificial Sequence
  Synthetic oligonucleotide
tgcacataattccacctttccacccttttcactttga

SEQ ID NO: 2205 - DNA, 38 bp, Artificial Sequence
  Synthetic oligonucleotide
tgagcatcttcacacgcatggctccacctcataaatga

SEQ ID NO: 2206 - DNA, 36 bp, Artificial Sequence; identical to SEQ ID NO: 1750
  Synthetic oligonucleotide

SEQ ID NO: 2207 - DNA, 37 bp, Artificial Sequence
  Synthetic oligonucleotide
tggtctgcacacgcacgtcgcctcttggggttatgga

SEQ ID NO: 2208 - DNA, 38 bp, Artificial Sequence
  Synthetic oligonucleotide
tgtagttttgcaatctatgggctaggaccatgtcatga

SEQ ID NO: 2209 - DNA, 37 bp, Artificial Sequence
  Synthetic oligonucleotide
tgctgttctcctggcgataggagattagccggacgga

SEQ ID NO: 2210 - DNA, 36 bp, Artificial Sequence
  Synthetic oligonucleotide
tgctaagagggctaaggccacacacttaataactta

SEQ ID NO: 2211 - DNA, 35 bp, Artificial Sequence; identical to SEQ ID NO: 2029
  Synthetic oligonucleotide

SEQ ID NO: 2212 - DNA, 38 bp, Artificial Sequence; identical to SEQ ID NO: 1609
  Synthetic oligonucleotide

SEQ ID NO: 2213 - DNA, 36 bp, Artificial Sequence
  Synthetic oligonucleotide
tggagtactagttccgaggacgtgagggaagactcg

SEQ ID NO: 2214 - DNA, 35 bp, Artificial Sequence
  Synthetic oligonucleotide
tggtccctggttccacttcattgagagcagagcat

SEQ ID NO: 2215 - DNA, 36 bp, Artificial Sequence
  Synthetic oligonucleotide
tgctcggatcttcgattcgtgccgcctgacaaatca

SEQ ID NO: 2216 - DNA, 35 bp, Artificial Sequence; identical to SEQ ID NO: 1644
  Synthetic oligonucleotide

SEQ ID NO: 2217 - DNA, 38 bp, Artificial Sequence
  Synthetic oligonucleotide
ttacgatgctcaagggtcccgttcgttcacagatatga

SEQ ID NO: 2218 - DNA, 38 bp, Artificial Sequence
  Synthetic oligonucleotide
ttacaaaccccggtgctctaaagttatcgatctcttga

SEQ ID NO: 2219 - DNA, 35 bp, Artificial Sequence
  Synthetic oligonucleotide
tgttggggggttagcacgggtttatgggttgcttc

SEQ ID NO: 2220 - DNA, 35 bp, Artificial Sequence
  Synthetic oligonucleotide
ttgcagtggagtaagccctgaccgaggagcgacga

SEQ ID NO: 2221 - DNA, 36 bp, Artificial Sequence
  Synthetic oligonucleotide
ttctcgcctacatctatctcaatattgtcctaccga

SEQ ID NO: 2222 - DNA, 36 bp, Artificial Sequence
  Synthetic oligonucleotide
ttgacatgcgatgtgcacagttagttaatttcaaca

SEQ ID NO: 2223 - DNA, 37 bp, Artificial Sequence
  Synthetic oligonucleotide
ttctatttactaaatacaacctttgtagcagacaaga

SEQ ID NO: 2224 - DNA, 36 bp, Artificial Sequence
  Synthetic oligonucleotide
ttccacacttcactgtacccactcttaccagccaca

SEQ ID NO: 2225 - DNA, 36 bp, Artificial Sequence
  Synthetic oligonucleotide
ttcctctagcctccgactggcgtgtgactctaaaga

SEQ ID NO: 2226 - DNA, 35 bp, Artificial Sequence
  Synthetic oligonucleotide
tttccgctatagtgcttctggtacgacgcgtacgg

SEQ ID NO: 2227 - DNA, 38 bp, Artificial Sequence
  Synthetic oligonucleotide
tttatactcatacccgaactgttccacaccgcaactga

SEQ ID NO: 2228 - DNA, 38 bp, Artificial Sequence
  Synthetic oligonucleotide
tttattcgccctttgttgacctacaccacatcacttga

SEQ ID NO: 2229 - DNA, 35 bp, Artificial Sequence; identical to SEQ ID NO: 1605
  Synthetic oligonucleotide

SEQ ID NO: 2230 - DNA, 38 bp, Artificial Sequence
  Synthetic oligonucleotide
ttgtagtttggccctttcgagggccgttgcctggttga

SEQ ID NO: 2231 - DNA, 38 bp, Artificial Sequence
  Synthetic oligonucleotide
tttttgttccataggtacggtctccggaggaatcgtga

SEQ ID NO: 2232 - DNA, 38 bp, Artificial Sequence
  Synthetic oligonucleotide
ttttgctaacgcgacggaggcgccgagagctatgctga

SEQ ID NO: 2233 - DNA, 35 bp, Artificial Sequence; identical to SEQ ID NO: 1599
  Synthetic oligonucleotide

SEQ ID NO: 2234 - DNA, 37 bp, Artificial Sequence; identical to SEQ ID NO: 1649
  Synthetic oligonucleotide

SEQ ID NO: 2235 - DNA, 36 bp, Artificial Sequence; identical to SEQ ID NO: 1651
  Synthetic oligonucleotide

SEQ ID NO: 2236 - DNA, 36 bp, Artificial Sequence; identical to SEQ ID NO: 1652
  Synthetic oligonucleotide

SEQ ID NO: 2237 - DNA, 37 bp, Artificial Sequence
  Synthetic oligonucleotide
aacgcctaactggacagaaaaatcgtacgctaccaga

SEQ ID NO: 2238 - DNA, 38 bp, Artificial Sequence; identical to SEQ ID NO: 1653
  Synthetic oligonucleotide

SEQ ID NO: 2239 - DNA, 38 bp, Artificial Sequence; identical to SEQ ID NO: 1792
  Synthetic oligonucleotide

SEQ ID NO: 2240 - DNA, 35 bp, Artificial Sequence
  Synthetic oligonucleotide
tggactggtcgtggggtgtgaacgaatccaatgtg

SEQ ID NO: 2241 - DNA, 38 bp, Artificial Sequence; identical to SEQ ID NO: 1731
  Synthetic oligonucleotide

SEQ ID NO: 2242 - DNA, 36 bp, Artificial Sequence
  Synthetic oligonucleotide
tgcaccctacccatttagatgtatcagccacgggca

SEQ ID NO: 2243 - DNA, 36 bp, Artificial Sequence
  Synthetic oligonucleotide
aacccgtagtagcacaccctgtctaacccaaatcaa

SEQ ID NO: 2244 - DNA, 35 bp, Artificial Sequence
  Synthetic oligonucleotide
aaacgcgatcttacatcattacaatccctcaaccc

SEQ ID NO: 2245 - DNA, 35 bp, Artificial Sequence
  Synthetic oligonucleotide
aaatcccatcgagcccttaacccagaccaactacg

SEQ ID NO: 2246 - DNA, 38 bp, Artificial Sequence
  Synthetic oligonucleotide
aagaacatgagactgaatatcgtacgcgagtaaaatga

SEQ ID NO: 2247 - DNA, 35 bp, Artificial Sequence
  Synthetic oligonucleotide
aagagtataggtccgagggaggacctactaattac

SEQ ID NO: 2248 - DNA, 38 bp, Artificial Sequence
  Synthetic oligonucleotide
aatttcggttacaccccgctctctatcactatacgtga

SEQ ID NO: 2249 - DNA, 37 bp, Artificial Sequence
  Synthetic oligonucleotide
accactagagtcctcaagaactcatccacccacctga

SEQ ID NO: 2250 - DNA, 35 bp, Artificial Sequence
  Synthetic oligonucleotide
acggtatttgttttttcgattgatggggaagtata

SEQ ID NO: 2251 - DNA, 37 bp, Artificial Sequence
  Synthetic oligonucleotide
accggcgaataacgccaaagcctgcgactggccttga

SEQ ID NO: 2252 - DNA, 35 bp, Artificial Sequence
  Synthetic oligonucleotide
acgcttttaaaaccatacactcgataactataccc

SEQ ID NO: 2253 - DNA, 36 bp, Artificial Sequence
  Synthetic oligonucleotide
accctactattaacccatcaaaagttcgctacccta

SEQ ID NO: 2254 - DNA, 36 bp, Artificial Sequence
  Synthetic oligonucleotide
acgcccatcgtttcgggcctttgtccatttcataca

SEQ ID NO: 2255 - DNA, 35 bp, Artificial Sequence
  Synthetic oligonucleotide
accttcccttcaacgggtgtattccggcgggtagc

SEQ ID NO: 2256 - DNA, 36 bp, Artificial Sequence
  Synthetic oligonucleotide
acttcacccacacaataccatcatcgataactcaaa

SEQ ID NO: 2257 - DNA, 35 bp, Artificial Sequence
  Synthetic oligonucleotide
agcggctaatcactgaagtagccccaggttttgaa

SEQ ID NO: 2258 - DNA, 37 bp, Artificial Sequence
  Synthetic oligonucleotide
agcaggcccaacggcctctgggttagtatccgcgtga

SEQ ID NO: 2259 - DNA, 36 bp, Artificial Sequence
  Synthetic oligonucleotide
agccgatccttgtccccgttgaaggccggatcgaaa

SEQ ID NO: 2260 - DNA, 38 bp, Artificial Sequence
  Synthetic oligonucleotide
aggcatctcaagcgctcggaggtacgcactatttctga

SEQ ID NO: 2261 - DNA, 35 bp, Artificial Sequence
  Synthetic oligonucleotide
agagacggcttcaacgcggctttcgggctctcttc

SEQ ID NO: 2262 - DNA, 35 bp, Artificial Sequence
  Synthetic oligonucleotide
agtacccccttatccctggggcctcccggggtacc

SEQ ID NO: 2263 - DNA, 36 bp, Artificial Sequence
  Synthetic oligonucleotide
atcaacaccattccctatatccaacactaaacgtaa

SEQ ID NO: 2264 - DNA, 37 bp, Artificial Sequence
  Synthetic oligonucleotide
agtttctcgacaggggcactctggccacgtggctgga

SEQ ID NO: 2265 - DNA, 35 bp, Artificial Sequence
  Synthetic oligonucleotide
aggggatactcagaacccgatgtaaatcttaagaa

SEQ ID NO: 2266 - DNA, 37 bp, Artificial Sequence
  Synthetic oligonucleotide
atcttcccaccacttgtgccttatcattgccccccga

SEQ ID NO: 2267 - DNA, 35 bp, Artificial Sequence; identical to SEQ ID NO: 1892
  Synthetic oligonucleotide

SEQ ID NO: 2268 - DNA, 35 bp, Artificial Sequence
  Synthetic oligonucleotide
ccagctagaccagacgaatgtggaactgaatctgc

SEQ ID NO: 2269 - DNA, 35 bp, Artificial Sequence
  Synthetic oligonucleotide
ccctaaaagcgacccactcagcggatttgacttgc

SEQ ID NO: 2270 - DNA, 35 bp, Artificial Sequence
  Synthetic oligonucleotide
ccaccccaccgagaggggctcatggcatacgctga

SEQ ID NO: 2271 - DNA, 36 bp, Artificial Sequence
  Synthetic oligonucleotide
cccgggaacacggtccgttcgtaggagaacgaccaa

SEQ ID NO: 2272 - DNA, 38 bp, Artificial Sequence
  Synthetic oligonucleotide
ccatgctctccggaggccgttttacggagggagcgtga

SEQ ID NO: 2273 - DNA, 36 bp, Artificial Sequence; identical to SEQ ID NO: 1651
  Synthetic oligonucleotide

SEQ ID NO: 2274 - DNA, 37 bp, Artificial Sequence
  Synthetic oligonucleotide
cgcttccgctacgtaccccccgggcgttcgccttgga

SEQ ID NO: 2275 - DNA, 37 bp, Artificial Sequence
  Synthetic oligonucleotide
ctcaaagcaacttgctggtgccagcaccgaagtccga

SEQ ID NO: 2276 - DNA, 38 bp, Artificial Sequence
  Synthetic oligonucleotide
ccttacatttatgttgaggcccccggtaattattgtga

SEQ ID NO: 2277 - DNA, 35 bp, Artificial Sequence
  Synthetic oligonucleotide
ctggtaccctgcgattcgggtctcgacttggttcc

SEQ ID NO: 2278 - DNA, 37 bp, Artificial Sequence
  Synthetic oligonucleotide
gaacgtacgccttcctcgtaataattggaaccttcta

SEQ ID NO: 2279 - DNA, 35 bp, Artificial Sequence
  Synthetic oligonucleotide
cttcgccatcttccggtcggcgaaaaacaggccac

SEQ ID NO: 2280 - DNA, 35 bp, Artificial Sequence; identical to SEQ ID NO: 1918
  Synthetic oligonucleotide

SEQ ID NO: 2281 - DNA, 37 bp, Artificial Sequence
  Synthetic oligonucleotide
gaggacattggaccgccccatacgaacgccactctga

SEQ ID NO: 2282 - DNA, 36 bp, Artificial Sequence
  Synthetic oligonucleotide
gagtacgactaattatcttaacaacatttatgaaca

SEQ ID NO: 2283 - DNA, 35 bp, Artificial Sequence
  Synthetic oligonucleotide
gagtagttgcatcgaagcggaggcttttccggatc

SEQ ID NO: 2284 - DNA, 36 bp, Artificial Sequence
  Synthetic oligonucleotide
gcactgtccccggttttctactaactctgatcttga

SEQ ID NO: 2285 - DNA, 38 bp, Artificial Sequence
  Synthetic oligonucleotide
gcgtcctgcactgttttacagttcttggtaatatttga

SEQ ID NO: 2286 - DNA, 37 bp, Artificial Sequence
  Synthetic oligonucleotide
ggcacacacctagcctgaaaggtcctttaacattgga

SEQ ID NO: 2287 - DNA, 37 bp, Artificial Sequence
  Synthetic oligonucleotide
ggcccagtactcacgctagaccctcgaggggactcga

SEQ ID NO: 2288 - DNA, 35 bp, Artificial Sequence
  Synthetic oligonucleotide
ggacccgtaccgacacctatagccttcccccagag

SEQ ID NO: 2289 - DNA, 37 bp, Artificial Sequence
  Synthetic oligonucleotide
ggtctagcgggtacaccttctggggttcggtttgtga

SEQ ID NO: 2290 - DNA, 37 bp, Artificial Sequence; identical to SEQ ID NO: 1939
  Synthetic oligonucleotide

SEQ ID NO: 2291 - DNA, 37 bp, Artificial Sequence
  Synthetic oligonucleotide
gggaactcgcaaaatttcttgaccccaaggtacccga

SEQ ID NO: 2292 - DNA, 37 bp, Artificial Sequence
  Synthetic oligonucleotide
ggtccttgagcatcaaatcgctaagggggtccgcaga

SEQ ID NO: 2293 - DNA, 37 bp, Artificial Sequence
  Synthetic oligonucleotide
gtctggtttttatattcagagccctgtttgggttaga

SEQ ID NO: 2294 - DNA, 35 bp, Artificial Sequence
  Synthetic oligonucleotide
taaggatagcgctcggcctttattgatacttgttt

SEQ ID NO: 2295 - DNA, 38 bp, Artificial Sequence
  Synthetic oligonucleotide
taaccgcatcactttcacttgacactaatacctcatga

SEQ ID NO: 2296 - DNA, 36 bp, Artificial Sequence
  Synthetic oligonucleotide
taatatccctgctctcgaacacttcgctttaaacta

SEQ ID NO: 2297 - DNA, 36 bp, Artificial Sequence; identical to SEQ ID NO: 1719
  Synthetic oligonucleotide

SEQ ID NO: 2298 - DNA, 36 bp, Artificial Sequence
  Synthetic oligonucleotide
gttccgctccagggaacagaggatcagggagttcga

SEQ ID NO: 2299 - DNA, 37 bp, Artificial Sequence
  Synthetic oligonucleotide
tatatccgcatcccgaagcatagatctcaagtactga

SEQ ID NO: 2300 - DNA, 38 bp, Artificial Sequence
  Synthetic oligonucleotide
tatacacccgaaaagcgggttatcaaaaattatcatga

SEQ ID NO: 2301 - DNA, 35 bp, Artificial Sequence
  Synthetic oligonucleotide
tactatcttctagttcaacagccacttatgaccca

SEQ ID NO: 2302 - DNA, 35 bp, Artificial Sequence
  Synthetic oligonucleotide
tacgccccttaacctctaaccagcgagggtagttc

SEQ ID NO: 2303 - DNA, 36 bp, Artificial Sequence
  Synthetic oligonucleotide
tcaacgaccgcgaggttgaacgacgtggggactgta

SEQ ID NO: 2304 - DNA, 38 bp, Artificial Sequence
  Synthetic oligonucleotide
tattatgttcacggccggaggggggccgggggatgcga

SEQ ID NO: 2305 - DNA, 36 bp, Artificial Sequence
  Synthetic oligonucleotide
tcgcatacaacaaaattacgcctaaccataacacca

SEQ ID NO: 2306 - DNA, 38 bp, Artificial Sequence
  Synthetic oligonucleotide
tgaagtactcgtaagttttatagtttttcattctatga

SEQ ID NO: 2307 - DNA, 36 bp, Artificial Sequence
  Synthetic oligonucleotide
tgacaaaagtcccctgaggggtggactcgtgaccca

SEQ ID NO: 2308 - DNA, 35 bp, Artificial Sequence
  Synthetic oligonucleotide
tgcgggtgcatgccgagtgagccgaacgacccatc

SEQ ID NO: 2309 - DNA, 38 bp, Artificial Sequence
  Synthetic oligonucleotide
tggccggggtttggccccagaaagatacgccggggtga

SEQ ID NO: 2310 - DNA, 36 bp, Artificial Sequence
  Synthetic oligonucleotide
tggacctactacgcttgggcaacgcgggggccccta

SEQ ID NO: 2311 - DNA, 38 bp, Artificial Sequence
  Synthetic oligonucleotide
tggacgattttgccaccgttagtacaacccgggggtga

SEQ ID NO: 2312 - DNA, 35 bp, Artificial Sequence
  Synthetic oligonucleotide
tgtagcccaggagaaaccctaccccaacggacgcg

SEQ ID NO: 2313 - DNA, 36 bp, Artificial Sequence
  Synthetic oligonucleotide
tgtggcgagggccgcctccaggcatgaaatgtatca

SEQ ID NO: 2314 - DNA, 38 bp, Artificial Sequence
  Synthetic oligonucleotide
tgtttgcttcatagtaacgttgagactgcataaactga

SEQ ID NO: 2315 - DNA, 35 bp, Artificial Sequence
  Synthetic oligonucleotide
tgttagttccactttccgataatccgcctccctta

SEQ ID NO: 2316 - DNA, 35 bp, Artificial Sequence
  Synthetic oligonucleotide
ttctcgacggccttccaggcgggagacaaagctgc

SEQ ID NO: 2317 - DNA, 38 bp, Artificial Sequence
  Synthetic oligonucleotide
ttcatggacgaaacgggcggcggacatttattcgctga

SEQ ID NO: 2318 - DNA, 38 bp, Artificial Sequence
  Synthetic oligonucleotide
tttgctccggtgtttgaccctcgcagtccggagagtga

SEQ ID NO: 2319 - DNA, 35 bp, Artificial Sequence; identical to SEQ ID NO: 2007
  Synthetic oligonucleotide

SEQ ID NO: 2320 - DNA, 36 bp, Artificial Sequence; identical to SEQ ID NO: 1590
  Synthetic oligonucleotide

SEQ ID NO: 2321 - DNA, 35 bp, Artificial Sequence; identical to SEQ ID NO: 1591
  Synthetic oligonucleotide

SEQ ID NO: 2322 - DNA, 38 bp, Artificial Sequence; identical to SEQ ID NO: 2016
  Synthetic oligonucleotide

SEQ ID NO: 2323 - DNA, 37 bp, Artificial Sequence
  Synthetic oligonucleotide
aacgcgctggtcttcgtgtattgtttcgcgctaagga

SEQ ID NO: 2324 - DNA, 35 bp, Artificial Sequence
  Synthetic oligonucleotide
aactatcattcatcttggtgtgatctacctttgtt

SEQ ID NO: 2325 - DNA, 37 bp, Artificial Sequence; identical to SEQ ID NO: 2005
  Synthetic oligonucleotide

SEQ ID NO: 2326 - DNA, 36 bp, Artificial Sequence
  Synthetic oligonucleotide
cttctatatatctcattcttccggtttattcaatca

SEQ ID NO: 2327 - DNA, 36 bp, Artificial Sequence; identical to SEQ ID NO: 1586
  Synthetic oligonucleotide

SEQ ID NO: 2328 - DNA, 37 bp, Artificial Sequence; identical to SEQ ID NO: 1595
  Synthetic oligonucleotide

SEQ ID NO: 2329 - DNA, 35 bp, Artificial Sequence; identical to SEQ ID NO: 1740
  Synthetic oligonucleotide

SEQ ID NO: 2330 - DNA, 35 bp, Artificial Sequence
  Synthetic oligonucleotide
acgcttcttttacttagctaaccattattcattgt

SEQ ID NO: 2331 - DNA, 37 bp, Artificial Sequence; identical to SEQ ID NO: 1587
  Synthetic oligonucleotide

SEQ ID NO: 2332 - DNA, 38 bp, Artificial Sequence; identical to SEQ ID NO: 2012
  Synthetic oligonucleotide

SEQ ID NO: 2333 - DNA, 35 bp, Artificial Sequence; identical to SEQ ID NO: 2014
  Synthetic oligonucleotide

SEQ ID NO: 2334 - DNA, 38 bp, Artificial Sequence; identical to SEQ ID NO: 1596
  Synthetic oligonucleotide

SEQ ID NO: 2335 - DNA, 35 bp, Artificial Sequence; identical to SEQ ID NO: 2028
  Synthetic oligonucleotide

SEQ ID NO: 2336 - DNA, 35 bp, Artificial Sequence; identical to SEQ ID NO: 1644
  Synthetic oligonucleotide

SEQ ID NO: 2337 - DNA, 36 bp, Artificial Sequence; identical to SEQ ID NO: 1638
  Synthetic oligonucleotide

SEQ ID NO: 2338 - DNA, 36 bp, Artificial Sequence; identical to SEQ ID NO: 2038
  Synthetic oligonucleotide

SEQ ID NO: 2339 - DNA, 35 bp, Artificial Sequence; identical to SEQ ID NO: 1606
  Synthetic oligonucleotide

SEQ ID NO: 2340 - DNA, 35 bp, Artificial Sequence; identical to SEQ ID NO: 2045
  Synthetic oligonucleotide

SEQ ID NO: 2341 - DNA, 38 bp, Artificial Sequence
  Synthetic oligonucleotide
ttctgccggtttttacggtcaaattctagatagtttga

SEQ ID NO: 2342 - DNA, 36 bp, Artificial Sequence; identical to SEQ ID NO: 1769
  Synthetic oligonucleotide

SEQ ID NO: 2343 - DNA, 38 bp, Artificial Sequence; identical to SEQ ID NO: 1601
  Synthetic oligonucleotide

SEQ ID NO: 2344 - DNA, 36 bp, Artificial Sequence; identical to SEQ ID NO: 1604
  Synthetic oligonucleotide

SEQ ID NO: 2345 - DNA, 35 bp, Artificial Sequence; identical to SEQ ID NO: 1605
  Synthetic oligonucleotide

SEQ ID NO: 2346 - DNA, 35 bp, Artificial Sequence; identical to SEQ ID NO: 2042
  Synthetic oligonucleotide

SEQ ID NO: 2347 - DNA, 36 bp, Artificial Sequence; identical to SEQ ID NO: 2043
  Synthetic oligonucleotide

SEQ ID NO: 2348 - DNA, 36 bp, Artificial Sequence; identical to SEQ ID NO: 2047
  Synthetic oligonucleotide

SEQ ID NO: 2349 - DNA, 36 bp, Artificial Sequence; identical to SEQ ID NO: 1611
  Synthetic oligonucleotide

SEQ ID NO: 2350 - DNA, 36 bp, Artificial Sequence; identical to SEQ ID NO: 1750
  Synthetic oligonucleotide

SEQ ID NO: 2351 - DNA, 36 bp, Artificial Sequence; identical to SEQ ID NO: 1598
  Synthetic oligonucleotide

SEQ ID NO: 2352 - DNA, 35 bp, Artificial Sequence; identical to SEQ ID NO: 1599
  Synthetic oligonucleotide

SEQ ID NO: 2353 - DNA, 37 bp, Artificial Sequence; identical to SEQ ID NO: 1649
  Synthetic oligonucleotide

SEQ ID NO: 2354 - DNA, 36 bp, Artificial Sequence; identical to SEQ ID NO: 1603
  Synthetic oligonucleotide

SEQ ID NO: 2355 - DNA, 36 bp, Artificial Sequence; identical to SEQ ID NO: 2048
  Synthetic oligonucleotide

SEQ ID NO: 2356 - DNA, 38 bp, Artificial Sequence; identical to SEQ ID NO: 1609
  Synthetic oligonucleotide

SEQ ID NO: 2357 - DNA, 35 bp, Artificial Sequence
  Synthetic oligonucleotide
aaatcccaacgagcccttaacccagaccaactaca

SEQ ID NO: 2358 - DNA, 37 bp, Artificial Sequence; identical to SEQ ID NO: 2055
  Synthetic oligonucleotide

SEQ ID NO: 2359 - DNA, 37 bp, Artificial Sequence
  Synthetic oligonucleotide
aacgtagtgaggtattccgcaccccctttattcgtga

SEQ ID NO: 2360 - DNA, 36 bp, Artificial Sequence
  Synthetic oligonucleotide
aacccaattcacatacactctcacccacactaaaca

SEQ ID NO: 2361 - DNA, 38 bp, Artificial Sequence
  Synthetic oligonucleotide
aaaaccgctcgcttaagctttctttgactttttgatga

SEQ ID NO: 2362 - DNA, 36 bp, Artificial Sequence
  Synthetic oligonucleotide
aatgcacaaccgcgctgaaaatcacctttatcgaaa

SEQ ID NO: 2363 - DNA, 37 bp, Artificial Sequence
  Synthetic oligonucleotide
aattgatctttttgtttacgaattcgtattccattga

SEQ ID NO: 2364 - DNA, 38 bp, Artificial Sequence
  Synthetic oligonucleotide
aatcaccacaaatactttcgcctatctcgcttatctga

SEQ ID NO: 2365 - DNA, 36 bp, Artificial Sequence
  Synthetic oligonucleotide
aacttgtcttatgctctccaccttacctattaacaa

SEQ ID NO: 2366 - DNA, 37 bp, Artificial Sequence
  Synthetic oligonucleotide
aactcctgatatcgtttcttcgtttccgccaattcta

SEQ ID NO: 2367 - DNA, 35 bp, Artificial Sequence; identical to SEQ ID NO: 2061
  Synthetic oligonucleotide

SEQ ID NO: 2368 - DNA, 38 bp, Artificial Sequence; identical to SEQ ID NO: 2024
  Synthetic oligonucleotide

SEQ ID NO: 2369 - DNA, 36 bp, Artificial Sequence
  Synthetic oligonucleotide
accgggaacatttctgttgtttcatttcatcactaa

SEQ ID NO: 2370 - DNA, 35 bp, Artificial Sequence; identical to SEQ ID NO: 2330
  Synthetic oligonucleotide

SEQ ID NO: 2371 - DNA, 37 bp, Artificial Sequence; identical to SEQ ID NO: 2067
  Synthetic oligonucleotide

SEQ ID NO: 2372 - DNA, 35 bp, Artificial Sequence
  Synthetic oligonucleotide
accgacgcactctcctttctaaaatctatctactt

SEQ ID NO: 2373 - DNA, 35 bp, Artificial Sequence
  Synthetic oligonucleotide
acgttaatttcccaaaaacgatcccactttgaaca

SEQ ID NO: 2374 - DNA, 36 bp, Artificial Sequence
  Synthetic oligonucleotide
actcgcccttcacgactttatcaaaatgtactttca

SEQ ID NO: 2375 - DNA, 38 bp, Artificial Sequence; identical to SEQ ID NO: 2071
  Synthetic oligonucleotide

SEQ ID NO: 2376 - DNA, 35 bp, Artificial Sequence; identical to SEQ ID NO: 1597
  Synthetic oligonucleotide

SEQ ID NO: 2377 - DNA, 36 bp, Artificial Sequence; identical to SEQ ID NO: 1617
  Synthetic oligonucleotide

SEQ ID NO: 2378 - DNA, 36 bp, Artificial Sequence
  Synthetic oligonucleotide
acttcgcccacacaataccattatcgataactcaaa

SEQ ID NO: 2379 - DNA, 35 bp, Artificial Sequence; identical to SEQ ID NO: 1591
  Synthetic oligonucleotide

SEQ ID NO: 2380 - DNA, 36 bp, Artificial Sequence; identical to SEQ ID NO: 1590
  Synthetic oligonucleotide

SEQ ID NO: 2381 - DNA, 38 bp, Artificial Sequence; identical to SEQ ID NO: 2023
  Synthetic oligonucleotide

SEQ ID NO: 2382 - DNA, 36 bp, Artificial Sequence; identical to SEQ ID NO: 1586
  Synthetic oligonucleotide

SEQ ID NO: 2383 - DNA, 35 bp, Artificial Sequence; identical to SEQ ID NO: 1620
  Synthetic oligonucleotide

SEQ ID NO: 2384 - DNA, 35 bp, Artificial Sequence
  Synthetic oligonucleotide
atatgcccgctccctactcaatatcttcccataca

SEQ ID NO: 2385 - DNA, 35 bp, Artificial Sequence; identical to SEQ ID NO: 1594
  Synthetic oligonucleotide

SEQ ID NO: 2386 - DNA, 37 bp, Artificial Sequence
  Synthetic oligonucleotide
atgcattatcccagctttaaacgctctacccaccgaa

SEQ ID NO: 2387 - DNA, 36 bp, Artificial Sequence; identical to SEQ ID NO: 2092
  Synthetic oligonucleotide

SEQ ID NO: 2388 - DNA, 35 bp, Artificial Sequence
  Synthetic oligonucleotide
atctgcttgtaagtccccgtgtatacctgttcagt

SEQ ID NO: 2389 - DNA, 35 bp, Artificial Sequence
  Synthetic oligonucleotide
atcactggagtgatagtctgggccctgaaactcct

SEQ ID NO: 2390 - DNA, 36 bp, Artificial Sequence
  Synthetic oligonucleotide
atcaccgtccttatcatacccacttcgttttttata

SEQ ID NO: 2391 - DNA, 35 bp, Artificial Sequence; identical to SEQ ID NO: 1740
  Synthetic oligonucleotide

SEQ ID NO: 2392 - DNA, 37 bp, Artificial Sequence; identical to SEQ ID NO: 2094
  Synthetic oligonucleotide

SEQ ID NO: 2393 - DNA, 36 bp, Artificial Sequence; identical to SEQ ID NO: 2098
  Synthetic oligonucleotide

SEQ ID NO: 2394 - DNA, 37 bp, Artificial Sequence; identical to SEQ ID NO: 1587
  Synthetic oligonucleotide

SEQ ID NO: 2395 - DNA, 38 bp, Artificial Sequence; identical to SEQ ID NO: 2100
  Synthetic oligonucleotide

SEQ ID NO: 2396 - DNA, 35 bp, Artificial Sequence
  Synthetic oligonucleotide
ccagcacactgacttttccttacccacctcctttc

SEQ ID NO: 2397 - DNA, 38 bp, Artificial Sequence
  Synthetic oligonucleotide
ccccgccatggtttcaaatggctgaagctatctattga

SEQ ID NO: 2398 - DNA, 38 bp, Artificial Sequence
  Synthetic oligonucleotide
ccggtatctgcactcgtttggaatcgaccaacccctga

SEQ ID NO: 2399 - DNA, 37 bp, Artificial Sequence
  Synthetic oligonucleotide
ccgtctactgcaacaggaggccaccacggtcttccga

SEQ ID NO: 2400 - DNA, 37 bp, Artificial Sequence
  Synthetic oligonucleotide
cgctcttcttactttattcaatatggtcataaattga

SEQ ID NO: 2401 - DNA, 37 bp, Artificial Sequence
  Synthetic oligonucleotide
cgtttctttatcccaaagtcattcgcatgccctttga

SEQ ID NO: 2402 - DNA, 38 bp, Artificial Sequence; identical to SEQ ID NO: 1596
  Synthetic oligonucleotide

SEQ ID NO: 2403 - DNA, 35 bp, Artificial Sequence
  Synthetic oligonucleotide
cgcgcctccttccccgatgatatgccactgccgca

SEQ ID NO: 2404 - DNA, 35 bp, Artificial Sequence; identical to SEQ ID NO: 2114
  Synthetic oligonucleotide

SEQ ID NO: 2405 - DNA, 37 bp, Artificial Sequence
  Synthetic oligonucleotide
cgcttcttgggcaggaggcgacacaggttcatattga

SEQ ID NO: 2406 - DNA, 35 bp, Artificial Sequence; identical to SEQ ID NO: 2120
  Synthetic oligonucleotide

SEQ ID NO: 2407 - DNA, 37 bp, Artificial Sequence
  Synthetic oligonucleotide
ctgtcccttgtaaggattattcgtaggtatttagtga

SEQ ID NO: 2408 - DNA, 37 bp, Artificial Sequence
  Synthetic oligonucleotide
ctgcggtcacctgcatagtaattaataatatacgtga

SEQ ID NO: 2409 - DNA, 37 bp, Artificial Sequence
  Synthetic oligonucleotide
cttcgctaaatggctgggggaatcatactgccggaga

SEQ ID NO: 2410 - DNA, 35 bp, Artificial Sequence
  Synthetic oligonucleotide
ctcctgcagatcttggtacctcttgttctttcata

SEQ ID NO: 2411 - DNA, 37 bp, Artificial Sequence; identical to SEQ ID NO: 1595
  Synthetic oligonucleotide

SEQ ID NO: 2412 - DNA, 35 bp, Artificial Sequence
  Synthetic oligonucleotide
gaggacttttacttatcaaccccacctttcgaaca

SEQ ID NO: 2413 - DNA, 35 bp, Artificial Sequence
  Synthetic oligonucleotide
gagtacttgactcttgtatattttttctccccctt

SEQ ID NO: 2414 - DNA, 37 bp, Artificial Sequence
  Synthetic oligonucleotide
gatcccgttccttttttaacgatctattttcttttga

SEQ ID NO: 2415 - DNA, 35 bp, Artificial Sequence; identical to SEQ ID NO: 2140
  Synthetic oligonucleotide

SEQ ID NO: 2416 - DNA, 35 bp, Artificial Sequence; identical to SEQ ID NO: 2014
  Synthetic oligonucleotide

SEQ ID NO: 2417 - DNA, 35 bp, Artificial Sequence; identical to SEQ ID NO: 1600
  Synthetic oligonucleotide

SEQ ID NO: 2418 - DNA, 36 bp, Artificial Sequence; identical to SEQ ID NO: 2143
  Synthetic oligonucleotide

SEQ ID NO: 2419 - DNA, 36 bp, Artificial Sequence; identical to SEQ ID NO: 2147
  Synthetic oligonucleotide

SEQ ID NO: 2420 - DNA, 36 bp, Artificial Sequence; identical to SEQ ID NO: 2151
  Synthetic oligonucleotide

SEQ ID NO: 2421 - DNA, 37 bp, Artificial Sequence
  Synthetic oligonucleotide
gcggaatagtccacgggacgctaagcgtggagctcga

SEQ ID NO: 2422 - DNA, 36 bp, Artificial Sequence
  Synthetic oligonucleotide
gcgtccactctatccttgctttaatacatcgttaaa

SEQ ID NO: 2423 - DNA, 38 bp, Artificial Sequence
  Synthetic oligonucleotide
gcctttccaggttcttcttttcgaccgtttatttttga

SEQ ID NO: 2424 - DNA, 38 bp, Artificial Sequence
  Synthetic oligonucleotide
ggccctggtggcaccaagccgcgagcccactcaactga

SEQ ID NO: 2425 - DNA, 35 bp, Artificial Sequence
  Synthetic oligonucleotide
ggtgcccaactggtgcttctccttctttgagacgt

SEQ ID NO: 2426 - DNA, 38 bp, Artificial Sequence
  Synthetic oligonucleotide
gggagtttttatcctacaatgtaaattatcatacttga

SEQ ID NO: 2427 - DNA, 38 bp, Artificial Sequence; identical to SEQ ID NO: 1601
  Synthetic oligonucleotide

SEQ ID NO: 2428 - DNA, 36 bp, Artificial Sequence
  Synthetic oligonucleotide
ggtcccactctgaccatcaattcacctaacttgtaa

SEQ ID NO: 2429 - DNA, 35 bp, Artificial Sequence; identical to SEQ ID NO: 1606
  Synthetic oligonucleotide

SEQ ID NO: 2430 - DNA, 37 bp, Artificial Sequence; identical to SEQ ID NO: 2166
  Synthetic oligonucleotide

SEQ ID NO: 2431 - DNA, 36 bp, Artificial Sequence; identical to SEQ ID NO: 1598
  Synthetic oligonucleotide

SEQ ID NO: 2432 - DNA, 38 bp, Artificial Sequence; identical to SEQ ID NO: 1772
  Synthetic oligonucleotide

SEQ ID NO: 2433 - DNA, 35 bp, Artificial Sequence
  Synthetic oligonucleotide
gtcgaaagcggagcgactctccgcacaaccccaag

SEQ ID NO: 2434 - DNA, 36 bp, Artificial Sequence; identical to SEQ ID NO: 1602
  Synthetic oligonucleotide

SEQ ID NO: 2435 - DNA, 36 bp, Artificial Sequence; identical to SEQ ID NO: 1603
  Synthetic oligonucleotide

SEQ ID NO: 2436 - DNA, 35 bp, Artificial Sequence
  Synthetic oligonucleotide
gttcagattttgctttgtgacctggtgtggggtct

SEQ ID NO: 2437 - DNA, 37 bp, Artificial Sequence; identical to SEQ ID NO: 2178
  Synthetic oligonucleotide

SEQ ID NO: 2438 - DNA, 36 bp, Artificial Sequence; identical to SEQ ID NO: 2048
  Synthetic oligonucleotide

SEQ ID NO: 2439 - DNA, 35 bp, Artificial Sequence; identical to SEQ ID NO: 1607
  Synthetic oligonucleotide

SEQ ID NO: 2440 - DNA, 36 bp, Artificial Sequence
  Synthetic oligonucleotide
tactctagtcagaggatctcttgcgatcaatatgga

SEQ ID NO: 2441 - DNA, 35 bp, Artificial Sequence
  Synthetic oligonucleotide
tactgtccttttcaattcttgtcttggttttatta

SEQ ID NO: 2442 - DNA, 35 bp, Artificial Sequence
  Synthetic oligonucleotide
tactcggccctactacacgaactcttttcaaatca

SEQ ID NO: 2443 - DNA, 35 bp, Artificial Sequence; identical to SEQ ID NO: 2186
  Synthetic oligonucleotide

SEQ ID NO: 2444 - DNA, 38 bp, Artificial Sequence
  Synthetic oligonucleotide
tattgtagcctgtacggcggctgcacctcgtacgttga

SEQ ID NO: 2445 - DNA, 35 bp, Artificial Sequence
  Synthetic oligonucleotide
tcactttgcccttttgtttcttcattaattccttc

SEQ ID NO: 2446 - DNA, 38 bp, Artificial Sequence
  Synthetic oligonucleotide
tcacgctcccggggttctatctatttcgttattcttga

SEQ ID NO: 2447 - DNA, 36 bp, Artificial Sequence; identical to SEQ ID NO: 1638
  Synthetic oligonucleotide

SEQ ID NO: 2448 - DNA, 36 bp, Artificial Sequence; identical to SEQ ID NO: 2038
  Synthetic oligonucleotide

SEQ ID NO: 2449 - DNA, 38 bp, Artificial Sequence; identical to SEQ ID NO: 1608
  Synthetic oligonucleotide

SEQ ID NO: 2450 - DNA, 35 bp, Artificial Sequence
  Synthetic oligonucleotide
tccatcatattcattattccatgcctacccatccc

SEQ ID NO: 2451 - DNA, 37 bp, Artificial Sequence; identical to SEQ ID NO: 1639
  Synthetic oligonucleotide

SEQ ID NO: 2452 - DNA, 38 bp, Artificial Sequence
  Synthetic oligonucleotide
tccccataatctccgtcctcattgcttccaaaatttga

SEQ ID NO: 2453 - DNA, 38 bp, Artificial Sequence
  Synthetic oligonucleotide
tcccctcgccactgacccatctactcgccaaatcttga

SEQ ID NO: 2454 - DNA, 38 bp, Artificial Sequence
  Synthetic oligonucleotide
tcgggcaataccctttcccatattatcttctttcctta

SEQ ID NO: 2455 - DNA, 36 bp, Artificial Sequence
  Synthetic oligonucleotide
tctcgggattttccgcgactactcgagcgctactca

SEQ ID NO: 2456 - DNA, 36 bp, Artificial Sequence
  Synthetic oligonucleotide
tcgcttccttgtacttcctattcccttttcaccaca

SEQ ID NO: 2457 - DNA, 36 bp, Artificial Sequence; identical to SEQ ID NO: 1604
  Synthetic oligonucleotide

SEQ ID NO: 2458 - DNA, 36 bp, Artificial Sequence
  Synthetic oligonucleotide
tcttcacgatatgcagtgaaaacaccacccaactta

SEQ ID NO: 2459 - DNA, 37 bp, Artificial Sequence
  Synthetic oligonucleotide
tctgcttgatggtgctttcagtttcttacttctacga

SEQ ID NO: 2460 - DNA, 35 bp, Artificial Sequence
  Synthetic oligonucleotide
tcttctgtaaccattttgttccggtttttttattt

SEQ ID NO: 2461 - DNA, 36 bp, Artificial Sequence
  Synthetic oligonucleotide
tgaagctccgaaggggtgcacttgccgacagtagta

SEQ ID NO: 2462 - DNA, 35 bp, Artificial Sequence
  Synthetic oligonucleotide
tgacgtctcctgttcggttaaccctgtgtgcctgt

SEQ ID NO: 2463 - DNA, 37 bp, Artificial Sequence
  Synthetic oligonucleotide
tgcccttcttcgtttactcttatccacattaccttga

SEQ ID NO: 2464 - DNA, 36 bp, Artificial Sequence; identical to SEQ ID NO: 1750
  Synthetic oligonucleotide

SEQ ID NO: 2465 - DNA, 36 bp, Artificial Sequence
  Synthetic oligonucleotide
tgacatatcgctcttacatcccctcacacaatttca

SEQ ID NO: 2466 - DNA, 35 bp, Artificial Sequence
  Synthetic oligonucleotide
tgctccgagtaccataaactaatttgaagctctac

SEQ ID NO: 2467 - DNA, 37 bp, Artificial Sequence; identical to SEQ ID NO: 2209
  Synthetic oligonucleotide

SEQ ID NO: 2468 - DNA, 36 bp, Artificial Sequence
  Synthetic oligonucleotide
tggaccggtcaaaggatggcaccggttcctctcaca

SEQ ID NO: 2469 - DNA, 38 bp, Artificial Sequence; identical to SEQ ID NO: 1609
  Synthetic oligonucleotide

SEQ ID NO: 2470 - DNA, 38 bp, Artificial Sequence
  Synthetic oligonucleotide
tgctttgtacaacgttggtgtttggcatttgctgttga

SEQ ID NO: 2471 - DNA, 38 bp, Artificial Sequence; identical to SEQ ID NO: 2218
  Synthetic oligonucleotide

SEQ ID NO: 2472 - DNA, 35 bp, Artificial Sequence
  Synthetic oligonucleotide
tgtgccactcgtgttcgaatttctgttccttatct

SEQ ID NO: 2473 - DNA, 37 bp, Artificial Sequence
  Synthetic oligonucleotide
tgttacgcccgtcctctatacaccaattacgatatga

SEQ ID NO: 2474 - DNA, 36 bp, Artificial Sequence
  Synthetic oligonucleotide
tgttaggcctttatttccattatcttaattgtttta

SEQ ID NO: 2475 - DNA, 35 bp, Artificial Sequence; identical to SEQ ID NO: 1644
  Synthetic oligonucleotide

SEQ ID NO: 2476 - DNA, 36 bp, Artificial Sequence
  Synthetic oligonucleotide
ttctgccggatacatttgattcaataactacttgta

SEQ ID NO: 2477 - DNA, 35 bp, Artificial Sequence
  Synthetic oligonucleotide
ttctgcttgcgagccgtccagttagggccgccacc

SEQ ID NO: 2478 - DNA, 38 bp, Artificial Sequence; identical to SEQ ID NO: 2341
  Synthetic oligonucleotide

SEQ ID NO: 2479 - DNA, 36 bp, Artificial Sequence
  Synthetic oligonucleotide
ttgcacgccccaatacacctaatctttatccataca

SEQ ID NO: 2480 - DNA, 38 bp, Artificial Sequence
  Synthetic oligonucleotide
ttcgttccggaccacccatttcctcaatcatatattga

SEQ ID NO: 2481 - DNA, 37 bp, Artificial Sequence
  Synthetic oligonucleotide
ttctgcgttttacgatgctcgatgtctgtgacatgga

SEQ ID NO: 2482 - DNA, 36 bp, Artificial Sequence
  Synthetic oligonucleotide
ttgctccgacctagtttactaaatttcaaccattga

SEQ ID NO: 2483 - DNA, 36 bp, Artificial Sequence
  Synthetic oligonucleotide
tttcattataccccatcgactttctctctagttcca

SEQ ID NO: 2484 - DNA, 35 bp, Artificial Sequence
  Synthetic oligonucleotide
ttgtcccaggcagtttccacgagaacgcgtacggt

SEQ ID NO: 2485 - DNA, 38 bp, Artificial Sequence
  Synthetic oligonucleotide
tttggacgtatcactccctaaccatttttttaccctga

SEQ ID NO: 2486 - DNA, 36 bp, Artificial Sequence; identical to SEQ ID NO: 1611
  Synthetic oligonucleotide

SEQ ID NO: 2487 - DNA, 35 bp, Artificial Sequence
  Synthetic oligonucleotide
tttcctgtttcttctttgtgtgtccatataatcga

SEQ ID NO: 2488 - DNA, 35 bp, Artificial Sequence; identical to SEQ ID NO: 1605
  Synthetic oligonucleotide

SEQ ID NO: 2489 - DNA, 36 bp, Artificial Sequence
  Synthetic oligonucleotide
tttaaacgtacgatattacttccgatccatacatta

SEQ ID NO: 2490 - DNA, 37 bp, Artificial Sequence; identical to SEQ ID NO: 1649
  Synthetic oligonucleotide

SEQ ID NO: 2491 - DNA, 35 bp, Artificial Sequence; identical to SEQ ID NO: 1599
  Synthetic oligonucleotide

SEQ ID NO: 2492 - DNA, 36 bp, Artificial Sequence; identical to SEQ ID NO: 1651
  Synthetic oligonucleotide

SEQ ID NO: 2493 - DNA, 36 bp, Artificial Sequence; identical to SEQ ID NO: 1652
  Synthetic oligonucleotide

SEQ ID NO: 2494 - DNA, 37 bp, Artificial Sequence; identical to SEQ ID NO: 2237
  Synthetic oligonucleotide

SEQ ID NO: 2495 - DNA, 38 bp, Artificial Sequence; identical to SEQ ID NO: 1653
  Synthetic oligonucleotide

SEQ ID NO: 2496 - DNA, 37 bp, Artificial Sequence
  Synthetic oligonucleotide
acaactatcaaataaacctgcgccctctatgaatgga

SEQ ID NO: 2497 - DNA, 36 bp, Artificial Sequence
  Synthetic oligonucleotide
gaccaatagacccggccaagactggagatgaaagta

SEQ ID NO: 2498 - DNA, 38 bp, Artificial Sequence; identical to SEQ ID NO: 1792
  Synthetic oligonucleotide

SEQ ID NO: 2499 - DNA, 36 bp, Artificial Sequence; identical to SEQ ID NO: 1661
  Synthetic oligonucleotide

SEQ ID NO: 2500 - DNA, 35 bp, Artificial Sequence
  Synthetic oligonucleotide
acggtatttgttttttcgattgatggggaagtaga

SEQ ID NO: 2501 - DNA, 38 bp, Artificial Sequence
  Synthetic oligonucleotide
ccacccgtacgaagccgcgttttctgagtgcctattga

SEQ ID NO: 2502 - DNA, 38 bp, Artificial Sequence; identical to SEQ ID NO: 1731
  Synthetic oligonucleotide

SEQ ID NO: 2503 - DNA, 35 bp, Artificial Sequence
  Synthetic oligonucleotide
ggccaatttgaatgagggttgtgaattatttaaga

SEQ ID NO: 2504 - DNA, 37 bp, Artificial Sequence
  Synthetic oligonucleotide
ggcctaaccatggggggtggtgattattatgaaggga

SEQ ID NO: 2505 - DNA, 36 bp, Artificial Sequence
  Synthetic oligonucleotide
ttcatcgcggggccgaggtaagcctaatcttccgta

SEQ ID NO: 2506 - DNA, 37 bp, Artificial Sequence
  Synthetic oligonucleotide
gtaactggtatcctaaaagaataggttcgtaccccga

SEQ ID NO: 2507 - DNA, 36 bp, Artificial Sequence; identical to SEQ ID NO: 2242
  Synthetic oligonucleotide

SEQ ID NO: 2508 - DNA, 36 bp, Artificial Sequence; identical to SEQ ID NO: 2243
  Synthetic oligonucleotide

SEQ ID NO: 2509 - DNA, 35 bp, Artificial Sequence; identical to SEQ ID NO: 2244
  Synthetic oligonucleotide

SEQ ID NO: 2510 - DNA, 35 bp, Artificial Sequence; identical to SEQ ID NO: 2245
  Synthetic oligonucleotide

SEQ ID NO: 2511 - DNA, 38 bp, Artificial Sequence; identical to SEQ ID NO: 2246
  Synthetic oligonucleotide

SEQ ID NO: 2512 - DNA, 35 bp, Artificial Sequence; identical to SEQ ID NO: 2247
  Synthetic oligonucleotide

SEQ ID NO: 2513 - DNA, 38 bp, Artificial Sequence; identical to SEQ ID NO: 2248
  Synthetic oligonucleotide

SEQ ID NO: 2514 - DNA, 37 bp, Artificial Sequence; identical to SEQ ID NO: 2249
  Synthetic oligonucleotide

SEQ ID NO: 2515 - DNA, 35 bp, Artificial Sequence; identical to SEQ ID NO: 2250
  Synthetic oligonucleotide

SEQ ID NO: 2516 - DNA, 37 bp, Artificial Sequence; identical to SEQ ID NO: 2251
  Synthetic oligonucleotide

SEQ ID NO: 2517 - DNA, 35 bp, Artificial Sequence; identical to SEQ ID NO: 2252
  Synthetic oligonucleotide

SEQ ID NO: 2518 - DNA, 36 bp, Artificial Sequence; identical to SEQ ID NO: 2253
  Synthetic oligonucleotide

SEQ ID NO: 2519 - DNA, 36 bp, Artificial Sequence; identical to SEQ ID NO: 2254
  Synthetic oligonucleotide

SEQ ID NO: 2520 - DNA, 35 bp, Artificial Sequence; identical to SEQ ID NO: 2255
  Synthetic oligonucleotide

SEQ ID NO: 2521 - DNA, 36 bp, Artificial Sequence; identical to SEQ ID NO: 2256
  Synthetic oligonucleotide

SEQ ID NO: 2522 - DNA, 35 bp, Artificial Sequence; identical to SEQ ID NO: 2257
  Synthetic oligonucleotide

SEQ ID NO: 2523 - DNA, 37 bp, Artificial Sequence; identical to SEQ ID NO: 2258
  Synthetic oligonucleotide

SEQ ID NO: 2524 - DNA, 36 bp, Artificial Sequence; identical to SEQ ID NO: 2259
  Synthetic oligonucleotide

SEQ ID NO: 2525 - DNA, 38 bp, Artificial Sequence; identical to SEQ ID NO: 2260
  Synthetic oligonucleotide

SEQ ID NO: 2526 - DNA, 35 bp, Artificial Sequence; identical to SEQ ID NO: 2261
  Synthetic oligonucleotide

SEQ ID NO: 2527 - DNA, 35 bp, Artificial Sequence; identical to SEQ ID NO: 2262
  Synthetic oligonucleotide

SEQ ID NO: 2528 - DNA, 36 bp, Artificial Sequence; identical to SEQ ID NO: 2263
  Synthetic oligonucleotide

SEQ ID NO: 2529 - DNA, 37 bp, Artificial Sequence; identical to SEQ ID NO: 2264
  Synthetic oligonucleotide

SEQ ID NO: 2530 - DNA, 35 bp, Artificial Sequence; identical to SEQ ID NO: 2265
  Synthetic oligonucleotide

SEQ ID NO: 2531 - DNA, 37 bp, Artificial Sequence; identical to SEQ ID NO: 2266
  Synthetic oligonucleotide

SEQ ID NO: 2532 - DNA, 35 bp, Artificial Sequence; identical to SEQ ID NO: 1892
  Synthetic oligonucleotide

SEQ ID NO: 2533 - DNA, 35 bp, Artificial Sequence; identical to SEQ ID NO: 2268
  Synthetic oligonucleotide

SEQ ID NO: 2534 - DNA, 35 bp, Artificial Sequence; identical to SEQ ID NO: 2269
  Synthetic oligonucleotide

SEQ ID NO: 2535 - DNA, 35 bp, Artificial Sequence; identical to SEQ ID NO: 2270
  Synthetic oligonucleotide

SEQ ID NO: 2536 - DNA, 36 bp, Artificial Sequence; identical to SEQ ID NO: 2271
  Synthetic oligonucleotide

SEQ ID NO: 2537 - DNA, 38 bp, Artificial Sequence; identical to SEQ ID NO: 2272
  Synthetic oligonucleotide

SEQ ID NO: 2538 - DNA, 36 bp, Artificial Sequence; identical to SEQ ID NO: 1651
  Synthetic oligonucleotide

SEQ ID NO: 2539 - DNA, 37 bp, Artificial Sequence; identical to SEQ ID NO: 2274
  Synthetic oligonucleotide

SEQ ID NO: 2540 - DNA, 37 bp, Artificial Sequence; identical to SEQ ID NO: 2275
  Synthetic oligonucleotide

SEQ ID NO: 2541 - DNA, 38 bp, Artificial Sequence; identical to SEQ ID NO: 2276
  Synthetic oligonucleotide

SEQ ID NO: 2542 - DNA, 35 bp, Artificial Sequence; identical to SEQ ID NO: 2277
  Synthetic oligonucleotide

SEQ ID NO: 2543 - DNA, 37 bp, Artificial Sequence; identical to SEQ ID NO: 2278
  Synthetic oligonucleotide

SEQ ID NO: 2544 - DNA, 35 bp, Artificial Sequence; identical to SEQ ID NO: 2279
  Synthetic oligonucleotide

SEQ ID NO: 2545 - DNA, 35 bp, Artificial Sequence; identical to SEQ ID NO: 1918
  Synthetic oligonucleotide

SEQ ID NO: 2546 - DNA, 37 bp, Artificial Sequence; identical to SEQ ID NO: 2281
  Synthetic oligonucleotide

SEQ ID NO: 2547 - DNA, 36 bp, Artificial Sequence; identical to SEQ ID NO: 2282
  Synthetic oligonucleotide

SEQ ID NO: 2548 - DNA, 35 bp, Artificial Sequence; identical to SEQ ID NO: 2283
  Synthetic oligonucleotide

SEQ ID NO: 2549 - DNA, 36 bp, Artificial Sequence; identical to SEQ ID NO: 2284
  Synthetic oligonucleotide

SEQ ID NO: 2550 - DNA, 38 bp, Artificial Sequence; identical to SEQ ID NO: 2285
  Synthetic oligonucleotide

SEQ ID NO: 2551 - DNA, 37 bp, Artificial Sequence; identical to SEQ ID NO: 2286
  Synthetic oligonucleotide

SEQ ID NO: 2552 - DNA, 37 bp, Artificial Sequence; identical to SEQ ID NO: 2287
  Synthetic oligonucleotide

SEQ ID NO: 2553 - DNA, 35 bp, Artificial Sequence; identical to SEQ ID NO: 2288
  Synthetic oligonucleotide

SEQ ID NO: 2554 - DNA, 37 bp, Artificial Sequence; identical to SEQ ID NO: 2289
  Synthetic oligonucleotide

SEQ ID NO: 2555 - DNA, 37 bp, Artificial Sequence; identical to SEQ ID NO: 1939
  Synthetic oligonucleotide

SEQ ID NO: 2556 - DNA, 37 bp, Artificial Sequence; identical to SEQ ID NO: 2291
  Synthetic oligonucleotide

SEQ ID NO: 2557 - DNA, 37 bp, Artificial Sequence; identical to SEQ ID NO: 2292
  Synthetic oligonucleotide

SEQ ID NO: 2558 - DNA, 37 bp, Artificial Sequence; identical to SEQ ID NO: 2293
  Synthetic oligonucleotide

SEQ ID NO: 2559 - DNA, 35 bp, Artificial Sequence; identical to SEQ ID NO: 2294
  Synthetic oligonucleotide

SEQ ID NO: 2560 - DNA, 38 bp, Artificial Sequence; identical to SEQ ID NO: 2295
  Synthetic oligonucleotide

SEQ ID NO: 2561 - DNA, 36 bp, Artificial Sequence; identical to SEQ ID NO: 2296
  Synthetic oligonucleotide

SEQ ID NO: 2562 - DNA, 36 bp, Artificial Sequence; identical to SEQ ID NO: 1719
  Synthetic oligonucleotide

SEQ ID NO: 2563 - DNA, 36 bp, Artificial Sequence; identical to SEQ ID NO: 2298
  Synthetic oligonucleotide

SEQ ID NO: 2564 - DNA, 37 bp, Artificial Sequence; identical to SEQ ID NO: 2299
  Synthetic oligonucleotide

SEQ ID NO: 2565 - DNA, 38 bp, Artificial Sequence; identical to SEQ ID NO: 2300
  Synthetic oligonucleotide

SEQ ID NO: 2566 - DNA, 35 bp, Artificial Sequence; identical to SEQ ID NO: 2301
  Synthetic oligonucleotide

SEQ ID NO: 2567 - DNA, 35 bp, Artificial Sequence; identical to SEQ ID NO: 2302
  Synthetic oligonucleotide

SEQ ID NO: 2568 - DNA, 36 bp, Artificial Sequence; identical to SEQ ID NO: 2303
  Synthetic oligonucleotide

SEQ ID NO: 2569 - DNA, 38 bp, Artificial Sequence; identical to SEQ ID NO: 2304
  Synthetic oligonucleotide

SEQ ID NO: 2570 - DNA, 36 bp, Artificial Sequence; identical to SEQ ID NO: 2305
  Synthetic oligonucleotide

SEQ ID NO: 2571 - DNA, 38 bp, Artificial Sequence; identical to SEQ ID NO: 2306
  Synthetic oligonucleotide

SEQ ID NO: 2572 - DNA, 36 bp, Artificial Sequence; identical to SEQ ID NO: 2307
  Synthetic oligonucleotide

SEQ ID NO: 2573 - DNA, 35 bp, Artificial Sequence; identical to SEQ ID NO: 2308
  Synthetic oligonucleotide

SEQ ID NO: 2574 - DNA, 38 bp, Artificial Sequence; identical to SEQ ID NO: 2309
  Synthetic oligonucleotide

SEQ ID NO: 2575 - DNA, 36 bp, Artificial Sequence; identical to SEQ ID NO: 2310
  Synthetic oligonucleotide

SEQ ID NO: 2576 - DNA, 38 bp, Artificial Sequence; identical to SEQ ID NO: 2311
  Synthetic oligonucleotide

SEQ ID NO: 2577 - DNA, 35 bp, Artificial Sequence; identical to SEQ ID NO: 2312
  Synthetic oligonucleotide

SEQ ID NO: 2578 - DNA, 36 bp, Artificial Sequence; identical to SEQ ID NO: 2313
  Synthetic oligonucleotide

SEQ ID NO: 2579 - DNA, 38 bp, Artificial Sequence; identical to SEQ ID NO: 2314
  Synthetic oligonucleotide

SEQ ID NO: 2580 - DNA, 35 bp, Artificial Sequence; identical to SEQ ID NO: 2315
  Synthetic oligonucleotide

SEQ ID NO: 2581 - DNA, 35 bp, Artificial Sequence; identical to SEQ ID NO: 2316
  Synthetic oligonucleotide

SEQ ID NO: 2582 - DNA, 38 bp, Artificial Sequence; identical to SEQ ID NO: 2317
  Synthetic oligonucleotide

SEQ ID NO: 2583 - DNA, 38 bp, Artificial Sequence; identical to SEQ ID NO: 2318
  Synthetic oligonucleotide

SEQ ID NO: 2584 - DNA, 38 bp, Artificial Sequence
  Synthetic oligonucleotide
atctatcgcctatcgctacaacccgtattcgcttctta

SEQ ID NO: 2585 - DNA, 38 bp, Artificial Sequence; identical to SEQ ID NO: 1543
  Synthetic oligonucleotide

SEQ ID NO: 2586 - DNA, 38 bp, Artificial Sequence; identical to SEQ ID NO: 1816
  Synthetic oligonucleotide

SEQ ID NO: 2587 - DNA, 38 bp, Artificial Sequence
  Synthetic oligonucleotide
attctctttattttatcgctttcatccagtgcatatga

SEQ ID NO: 2588 - DNA, 38 bp, Artificial Sequence; identical to SEQ ID NO: 1817
  Synthetic oligonucleotide

SEQ ID NO: 2589 - DNA, 35 bp, Artificial Sequence
  Synthetic oligonucleotide
ggcttcttatttgcttgaatatccgcttcctctct

SEQ ID NO: 2590 - DNA, 35 bp, Artificial Sequence; identical to SEQ ID NO: 1550
  Synthetic oligonucleotide

SEQ ID NO: 2591 - DNA, 35 bp, Artificial Sequence; identical to SEQ ID NO: 1551
  Synthetic oligonucleotide

SEQ ID NO: 2592 - DNA, 38 bp, Artificial Sequence; identical to SEQ ID NO: 1804
  Synthetic oligonucleotide

SEQ ID NO: 2593 - DNA, 37 bp, Artificial Sequence; identical to SEQ ID NO: 1820
  Synthetic oligonucleotide

SEQ ID NO: 2594 - DNA, 35 bp, Artificial Sequence; identical to SEQ ID NO: 2357
  Synthetic oligonucleotide

SEQ ID NO: 2595 - DNA, 37 bp, Artificial Sequence; identical to SEQ ID NO: 2055
  Synthetic oligonucleotide

SEQ ID NO: 2596 - DNA, 37 bp, Artificial Sequence; identical to SEQ ID NO: 2359
  Synthetic oligonucleotide

SEQ ID NO: 2597 - DNA, 36 bp, Artificial Sequence; identical to SEQ ID NO: 2360
  Synthetic oligonucleotide

SEQ ID NO: 2598 - DNA, 38 bp, Artificial Sequence; identical to SEQ ID NO: 2361
  Synthetic oligonucleotide

SEQ ID NO: 2599 - DNA, 36 bp, Artificial Sequence; identical to SEQ ID NO: 2362
  Synthetic oligonucleotide

SEQ ID NO: 2600 - DNA, 37 bp, Artificial Sequence; identical to SEQ ID NO: 2363
  Synthetic oligonucleotide

SEQ ID NO: 2601 - DNA, 38 bp, Artificial Sequence; identical to SEQ ID NO: 2364
  Synthetic oligonucleotide

SEQ ID NO: 2602 - DNA, 36 bp, Artificial Sequence; identical to SEQ ID NO: 2365
  Synthetic oligonucleotide

SEQ ID NO: 2603 - DNA, 37 bp, Artificial Sequence; identical to SEQ ID NO: 2366
  Synthetic oligonucleotide

SEQ ID NO: 2604 - DNA, 35 bp, Artificial Sequence; identical to SEQ ID NO: 2061
  Synthetic oligonucleotide

SEQ ID NO: 2605 - DNA, 38 bp, Artificial Sequence; identical to SEQ ID NO: 2024
  Synthetic oligonucleotide

SEQ ID NO: 2606 - DNA, 36 bp, Artificial Sequence; identical to SEQ ID NO: 2369
  Synthetic oligonucleotide

SEQ ID NO: 2607 - DNA, 35 bp, Artificial Sequence; identical to SEQ ID NO: 2330
  Synthetic oligonucleotide

SEQ ID NO: 2608 - DNA, 37 bp, Artificial Sequence; identical to SEQ ID NO: 2067
  Synthetic oligonucleotide

SEQ ID NO: 2609 - DNA, 35 bp, Artificial Sequence; identical to SEQ ID NO: 2372
  Synthetic oligonucleotide

SEQ ID NO: 2610 - DNA, 35 bp, Artificial Sequence; identical to SEQ ID NO: 2373
  Synthetic oligonucleotide

SEQ ID NO: 2611 - DNA, 36 bp, Artificial Sequence; identical to SEQ ID NO: 2374
  Synthetic oligonucleotide

SEQ ID NO: 2612 - DNA, 38 bp, Artificial Sequence; identical to SEQ ID NO: 2071
  Synthetic oligonucleotide

SEQ ID NO: 2613 - DNA, 35 bp, Artificial Sequence; identical to SEQ ID NO: 1597
  Synthetic oligonucleotide

SEQ ID NO: 2614 - DNA, 36 bp, Artificial Sequence; identical to SEQ ID NO: 1617
  Synthetic oligonucleotide

SEQ ID NO: 2615 - DNA, 36 bp, Artificial Sequence; identical to SEQ ID NO: 2378
  Synthetic oligonucleotide

SEQ ID NO: 2616 - DNA, 35 bp, Artificial Sequence; identical to SEQ ID NO: 1591
  Synthetic oligonucleotide

SEQ ID NO: 2617 - DNA, 36 bp, Artificial Sequence; identical to SEQ ID NO: 1590
  Synthetic oligonucleotide

SEQ ID NO: 2618 - DNA, 38 bp, Artificial Sequence; identical to SEQ ID NO: 2023
  Synthetic oligonucleotide

SEQ ID NO: 2619 - DNA, 36 bp, Artificial Sequence; identical to SEQ ID NO: 1586
  Synthetic oligonucleotide

SEQ ID NO: 2620 - DNA, 35 bp, Artificial Sequence; identical to SEQ ID NO: 1620
  Synthetic oligonucleotide

SEQ ID NO: 2621 - DNA, 35 bp, Artificial Sequence; identical to SEQ ID NO: 2384
  Synthetic oligonucleotide

SEQ ID NO: 2622 - DNA, 35 bp, Artificial Sequence; identical to SEQ ID NO: 1594
  Synthetic oligonucleotide

SEQ ID NO: 2623 - DNA, 37 bp, Artificial Sequence; identical to SEQ ID NO: 2386
  Synthetic oligonucleotide

SEQ ID NO: 2624 - DNA, 36 bp, Artificial Sequence; identical to SEQ ID NO: 2092
  Synthetic oligonucleotide

SEQ ID NO: 2625 - DNA, 35 bp, Artificial Sequence; identical to SEQ ID NO: 2388
  Synthetic oligonucleotide

SEQ ID NO: 2626 - DNA, 35 bp, Artificial Sequence; identical to SEQ ID NO: 2389
  Synthetic oligonucleotide

SEQ ID NO: 2627 - DNA, 36 bp, Artificial Sequence; identical to SEQ ID NO: 2390
  Synthetic oligonucleotide

SEQ ID NO: 2628 - DNA, 35 bp, Artificial Sequence; identical to SEQ ID NO: 1740
  Synthetic oligonucleotide

SEQ ID NO: 2629 - DNA, 37 bp, Artificial Sequence; identical to SEQ ID NO: 2094
  Synthetic oligonucleotide

SEQ ID NO: 2630 - DNA, 36 bp, Artificial Sequence; identical to SEQ ID NO: 2098
  Synthetic oligonucleotide

SEQ ID NO: 2631 - DNA, 37 bp, Artificial Sequence; identical to SEQ ID NO: 1587
  Synthetic oligonucleotide

SEQ ID NO: 2632 - DNA, 38 bp, Artificial Sequence; identical to SEQ ID NO: 2100
  Synthetic oligonucleotide

SEQ ID NO: 2633 - DNA, 35 bp, Artificial Sequence; identical to SEQ ID NO: 2396
  Synthetic oligonucleotide

SEQ ID NO: 2634 - DNA, 38 bp, Artificial Sequence; identical to SEQ ID NO: 2397
  Synthetic oligonucleotide

SEQ ID NO: 2635 - DNA, 38 bp, Artificial Sequence; identical to SEQ ID NO: 2398
  Synthetic oligonucleotide

SEQ ID NO: 2636 - DNA, 37 bp, Artificial Sequence; identical to SEQ ID NO: 2399
  Synthetic oligonucleotide

SEQ ID NO: 2637 - DNA, 37 bp, Artificial Sequence; identical to SEQ ID NO: 2400
  Synthetic oligonucleotide

SEQ ID NO: 2638 - DNA, 37 bp, Artificial Sequence; identical to SEQ ID NO: 2401
  Synthetic oligonucleotide

SEQ ID NO: 2639 - DNA, 38 bp, Artificial Sequence; identical to SEQ ID NO: 1596
  Synthetic oligonucleotide

SEQ ID NO: 2640 - DNA, 35 bp, Artificial Sequence; identical to SEQ ID NO: 2403
  Synthetic oligonucleotide

SEQ ID NO: 2641 - DNA, 35 bp, Artificial Sequence; identical to SEQ ID NO: 2114
  Synthetic oligonucleotide

SEQ ID NO: 2642 - DNA, 37 bp, Artificial Sequence; identical to SEQ ID NO: 2405
  Synthetic oligonucleotide

SEQ ID NO: 2643 - DNA, 35 bp, Artificial Sequence; identical to SEQ ID NO: 2120
  Synthetic oligonucleotide

SEQ ID NO: 2644 - DNA, 37 bp, Artificial Sequence; identical to SEQ ID NO: 2407
  Synthetic oligonucleotide

SEQ ID NO: 2645 - DNA, 37 bp, Artificial Sequence; identical to SEQ ID NO: 2408
  Synthetic oligonucleotide

SEQ ID NO: 2646 - DNA, 37 bp, Artificial Sequence; identical to SEQ ID NO: 2409
  Synthetic oligonucleotide

SEQ ID NO: 2647 - DNA, 35 bp, Artificial Sequence; identical to SEQ ID NO: 2410
  Synthetic oligonucleotide

SEQ ID NO: 2648 - DNA, 37 bp, Artificial Sequence; identical to SEQ ID NO: 1595
  Synthetic oligonucleotide

SEQ ID NO: 2649 - DNA, 35 bp, Artificial Sequence; identical to SEQ ID NO: 2412
  Synthetic oligonucleotide

SEQ ID NO: 2650 - DNA, 35 bp, Artificial Sequence; identical to SEQ ID NO: 2413
  Synthetic oligonucleotide

SEQ ID NO: 2651 - DNA, 37 bp, Artificial Sequence; identical to SEQ ID NO: 2414
  Synthetic oligonucleotide

SEQ ID NO: 2652 - DNA, 35 bp, Artificial Sequence; identical to SEQ ID NO: 2140
  Synthetic oligonucleotide

SEQ ID NO: 2653 - DNA, 35 bp, Artificial Sequence; identical to SEQ ID NO: 2014
  Synthetic oligonucleotide

SEQ ID NO: 2654 - DNA, 35 bp, Artificial Sequence; identical to SEQ ID NO: 1600
  Synthetic oligonucleotide

SEQ ID NO: 2655 - DNA, 36 bp, Artificial Sequence; identical to SEQ ID NO: 2143
  Synthetic oligonucleotide

SEQ ID NO: 2656 - DNA, 36 bp, Artificial Sequence; identical to SEQ ID NO: 2147
  Synthetic oligonucleotide

SEQ ID NO: 2657 - DNA, 36 bp, Artificial Sequence; identical to SEQ ID NO: 2151
  Synthetic oligonucleotide

SEQ ID NO: 2658 - DNA, 37 bp, Artificial Sequence; identical to SEQ ID NO: 2421
  Synthetic oligonucleotide

SEQ ID NO: 2659 - DNA, 36 bp, Artificial Sequence; identical to SEQ ID NO: 2422
  Synthetic oligonucleotide

SEQ ID NO: 2660 - DNA, 38 bp, Artificial Sequence; identical to SEQ ID NO: 2423
  Synthetic oligonucleotide

SEQ ID NO: 2661 - DNA, 38 bp, Artificial Sequence; identical to SEQ ID NO: 2424
  Synthetic oligonucleotide

SEQ ID NO: 2662 - DNA, 35 bp, Artificial Sequence; identical to SEQ ID NO: 2425
  Synthetic oligonucleotide

SEQ ID NO: 2663 - DNA, 38 bp, Artificial Sequence; identical to SEQ ID NO: 2426
  Synthetic oligonucleotide

SEQ ID NO: 2664 - DNA, 38 bp, Artificial Sequence; identical to SEQ ID NO: 1601
  Synthetic oligonucleotide

SEQ ID NO: 2665 - DNA, 36 bp, Artificial Sequence; identical to SEQ ID NO: 2428
  Synthetic oligonucleotide

SEQ ID NO: 2666 - DNA, 35 bp, Artificial Sequence; identical to SEQ ID NO: 1606
  Synthetic oligonucleotide

SEQ ID NO: 2667 - DNA, 37 bp, Artificial Sequence; identical to SEQ ID NO: 2166
  Synthetic oligonucleotide

SEQ ID NO: 2668 - DNA, 36 bp, Artificial Sequence; identical to SEQ ID NO: 1598
  Synthetic oligonucleotide

SEQ ID NO: 2669 - DNA, 38 bp, Artificial Sequence; identical to SEQ ID NO: 1772
  Synthetic oligonucleotide

SEQ ID NO: 2670 - DNA, 35 bp, Artificial Sequence; identical to SEQ ID NO: 2433
  Synthetic oligonucleotide

SEQ ID NO: 2671 - DNA, 36 bp, Artificial Sequence; identical to SEQ ID NO: 1602
  Synthetic oligonucleotide

SEQ ID NO: 2672 - DNA, 36 bp, Artificial Sequence; identical to SEQ ID NO: 1603
  Synthetic oligonucleotide

SEQ ID NO: 2673 - DNA, 35 bp, Artificial Sequence; identical to SEQ ID NO: 2436
  Synthetic oligonucleotide

SEQ ID NO: 2674 - DNA, 37 bp, Artificial Sequence; identical to SEQ ID NO: 2178
  Synthetic oligonucleotide

SEQ ID NO: 2675 - DNA, 36 bp, Artificial Sequence; identical to SEQ ID NO: 2048
  Synthetic oligonucleotide

SEQ ID NO: 2676 - DNA, 35 bp, Artificial Sequence; identical to SEQ ID NO: 1607
  Synthetic oligonucleotide

SEQ ID NO: 2677 - DNA, 36 bp, Artificial Sequence; identical to SEQ ID NO: 2440
  Synthetic oligonucleotide

SEQ ID NO: 2678 - DNA, 35 bp, Artificial Sequence; identical to SEQ ID NO: 2441
  Synthetic oligonucleotide

SEQ ID NO: 2679 - DNA, 35 bp, Artificial Sequence; identical to SEQ ID NO: 2442
  Synthetic oligonucleotide

SEQ ID NO: 2680 - DNA, 35 bp, Artificial Sequence; identical to SEQ ID NO: 2186
  Synthetic oligonucleotide

SEQ ID NO: 2681 - DNA, 38 bp, Artificial Sequence; identical to SEQ ID NO: 2444
  Synthetic oligonucleotide

SEQ ID NO: 2682 - DNA, 35 bp, Artificial Sequence; identical to SEQ ID NO: 2445
  Synthetic oligonucleotide

SEQ ID NO: 2683 - DNA, 38 bp, Artificial Sequence; identical to SEQ ID NO: 2446
  Synthetic oligonucleotide

SEQ ID NO: 2684 - DNA, 36 bp, Artificial Sequence; identical to SEQ ID NO: 1638
  Synthetic oligonucleotide

SEQ ID NO: 2685 - DNA, 36 bp, Artificial Sequence; identical to SEQ ID NO: 2038
  Synthetic oligonucleotide

SEQ ID NO: 2686 - DNA, 38 bp, Artificial Sequence; identical to SEQ ID NO: 1608
  Synthetic oligonucleotide

SEQ ID NO: 2687 - DNA, 35 bp, Artificial Sequence; identical to SEQ ID NO: 2450
  Synthetic oligonucleotide

SEQ ID NO: 2688 - DNA, 37 bp, Artificial Sequence; identical to SEQ ID NO: 1639
  Synthetic oligonucleotide

SEQ ID NO: 2689 - DNA, 38 bp, Artificial Sequence; identical to SEQ ID NO: 2452
  Synthetic oligonucleotide

SEQ ID NO: 2690 - DNA, 38 bp, Artificial Sequence; identical to SEQ ID NO: 2453
  Synthetic oligonucleotide

SEQ ID NO: 2691 - DNA, 38 bp, Artificial Sequence; identical to SEQ ID NO: 2454
  Synthetic oligonucleotide

SEQ ID NO: 2692 - DNA, 36 bp, Artificial Sequence; identical to SEQ ID NO: 2455
  Synthetic oligonucleotide

SEQ ID NO: 2693 - DNA, 36 bp, Artificial Sequence; identical to SEQ ID NO: 2456
  Synthetic oligonucleotide

SEQ ID NO: 2694 - DNA, 36 bp, Artificial Sequence; identical to SEQ ID NO: 1604
  Synthetic oligonucleotide

SEQ ID NO: 2695 - DNA, 36 bp, Artificial Sequence; identical to SEQ ID NO: 2458
  Synthetic oligonucleotide

SEQ ID NO: 2696 - DNA, 37 bp, Artificial Sequence; identical to SEQ ID NO: 2459
  Synthetic oligonucleotide

SEQ ID NO: 2697 - DNA, 35 bp, Artificial Sequence; identical to SEQ ID NO: 2460
  Synthetic oligonucleotide

SEQ ID NO: 2698 - DNA, 36 bp, Artificial Sequence; identical to SEQ ID NO: 2461
  Synthetic oligonucleotide

SEQ ID NO: 2699 - DNA, 35 bp, Artificial Sequence; identical to SEQ ID NO: 2462
  Synthetic oligonucleotide

SEQ ID NO: 2700 - DNA, 37 bp, Artificial Sequence; identical to SEQ ID NO: 2463
  Synthetic oligonucleotide

SEQ ID NO: 2701 - DNA, 36 bp, Artificial Sequence; identical to SEQ ID NO: 1750
  Synthetic oligonucleotide

SEQ ID NO: 2702 - DNA, 36 bp, Artificial Sequence; identical to SEQ ID NO: 2465
  Synthetic oligonucleotide

SEQ ID NO: 2703 - DNA, 35 bp, Artificial Sequence; identical to SEQ ID NO: 2466
  Synthetic oligonucleotide

SEQ ID NO: 2704 - DNA, 37 bp, Artificial Sequence; identical to SEQ ID NO: 2209
  Synthetic oligonucleotide

SEQ ID NO: 2705 - DNA, 36 bp, Artificial Sequence; identical to SEQ ID NO: 2468
  Synthetic oligonucleotide

SEQ ID NO: 2706 - DNA, 38 bp, Artificial Sequence; identical to SEQ ID NO: 1609
  Synthetic oligonucleotide

SEQ ID NO: 2707 - DNA, 38 bp, Artificial Sequence; identical to SEQ ID NO: 2470
  Synthetic oligonucleotide

SEQ ID NO: 2708 - DNA, 38 bp, Artificial Sequence; identical to SEQ ID NO: 2218
  Synthetic oligonucleotide

SEQ ID NO: 2709 - DNA, 35 bp, Artificial Sequence; identical to SEQ ID NO: 2472
  Synthetic oligonucleotide

SEQ ID NO: 2710 - DNA, 37 bp, Artificial Sequence; identical to SEQ ID NO: 2473
  Synthetic oligonucleotide

SEQ ID NO: 2711 - DNA, 36 bp, Artificial Sequence; identical to SEQ ID NO: 2474
  Synthetic oligonucleotide

SEQ ID NO: 2712 - DNA, 35 bp, Artificial Sequence; identical to SEQ ID NO: 1644
  Synthetic oligonucleotide

SEQ ID NO: 2713 - DNA, 36 bp, Artificial Sequence; identical to SEQ ID NO: 2476
  Synthetic oligonucleotide

SEQ ID NO: 2714 - DNA, 35 bp, Artificial Sequence; identical to SEQ ID NO: 2477
  Synthetic oligonucleotide

SEQ ID NO: 2715 - DNA, 38 bp, Artificial Sequence; identical to SEQ ID NO: 2341
  Synthetic oligonucleotide

SEQ ID NO: 2716 - DNA, 36 bp, Artificial Sequence; identical to SEQ ID NO: 2479
  Synthetic oligonucleotide

SEQ ID NO: 2717 - DNA, 38 bp, Artificial Sequence; identical to SEQ ID NO: 2480
  Synthetic oligonucleotide

SEQ ID NO: 2718 - DNA, 37 bp, Artificial Sequence; identical to SEQ ID NO: 2481
  Synthetic oligonucleotide

SEQ ID NO: 2719 - DNA, 36 bp, Artificial Sequence; identical to SEQ ID NO: 2482
  Synthetic oligonucleotide

SEQ ID NO: 2720 - DNA, 36 bp, Artificial Sequence; identical to SEQ ID NO: 2483
  Synthetic oligonucleotide

SEQ ID NO: 2721 - DNA, 35 bp, Artificial Sequence; identical to SEQ ID NO: 2484
  Synthetic oligonucleotide

SEQ ID NO: 2722 - DNA, 38 bp, Artificial Sequence; identical to SEQ ID NO: 2485
  Synthetic oligonucleotide

SEQ ID NO: 2723 - DNA, 36 bp, Artificial Sequence; identical to SEQ ID NO: 1611
  Synthetic oligonucleotide

SEQ ID NO: 2724 - DNA, 35 bp, Artificial Sequence; identical to SEQ ID NO: 2487
  Synthetic oligonucleotide

SEQ ID NO: 2725 - DNA, 35 bp, Artificial Sequence; identical to SEQ ID NO: 1605
  Synthetic oligonucleotide

SEQ ID NO: 2726 - DNA, 36 bp, Artificial Sequence; identical to SEQ ID NO: 2489
  Synthetic oligonucleotide

SEQ ID NO: 2727 - DNA, 37 bp, Artificial Sequence; identical to SEQ ID NO: 1649
  Synthetic oligonucleotide

SEQ ID NO: 2728 - DNA, 35 bp, Artificial Sequence; identical to SEQ ID NO: 1599
  Synthetic oligonucleotide

SEQ ID NO: 2729 - DNA, 36 bp, Artificial Sequence
  Synthetic oligonucleotide
aattgtgaatcacaactcctggtatataggctttga

SEQ ID NO: 2730 - DNA, 36 bp, Artificial Sequence
  Synthetic oligonucleotide
cggcatacgaacctgtctcaaatcctagtaaggtaa

SEQ ID NO: 2731 - DNA, 36 bp, Artificial Sequence
  Synthetic oligonucleotide
agttgtgaaacacaactcctggtatataggctttga

SEQ ID NO: 2732 - DNA, 36 bp, Artificial Sequence
  Synthetic oligonucleotide
gagcttgatatcatcttccacttcttcgctattcta

SEQ ID NO: 2733 - DNA, 38 bp, Artificial Sequence
  Synthetic oligonucleotide
ggtcataatgtgaatcatgaatagtactaatttactga

SEQ ID NO: 2734 - DNA, 36 bp, Artificial Sequence
  Synthetic oligonucleotide
tggcggctcacgtattctgaaagttagtggtgcgga

SEQ ID NO: 2735 - DNA, 37 bp, Artificial Sequence
  Synthetic oligonucleotide
tagctcatgggttgcatcctcaggataactccgctga

SEQ ID NO: 2736 - DNA, 35 bp, Artificial Sequence
  Synthetic oligonucleotide
tcttattttcgcaagatcttttatctaaatacaat

SEQ ID NO: 2737 - DNA, 38 bp, Artificial Sequence
  Synthetic oligonucleotide
tttcgaccattgtgggatttccggcggtccaattatga

SEQ ID NO: 2738 - DNA, 38 bp, Artificial Sequence
  Synthetic oligonucleotide
actaggaagaacaggtacgtagggacacctgacagtga

SEQ ID NO: 2739 - DNA, 37 bp, Artificial Sequence
  Synthetic oligonucleotide
gacagctatcaacgaccgacaacggaaattggtgtga

SEQ ID NO: 2740 - DNA, 37 bp, Artificial Sequence
  Synthetic oligonucleotide
gggcgtcccttgcgttctctcaacgaatgtgtcgcga

SEQ ID NO: 2741 - DNA, 38 bp, Artificial Sequence
  Synthetic oligonucleotide
tggcgggcgtgggtgttgccgagacgtcagtaccgtga

SEQ ID NO: 2742 - DNA, 37 bp, Artificial Sequence
  Synthetic oligonucleotide
tggagcggcgagttggaatcctgatgtgggctcatga

SEQ ID NO: 2743 - DNA, 38 bp, Artificial Sequence
  Synthetic oligonucleotide
atagataaatggggaggtcgcgcattgaatgatggtga

SEQ ID NO: 2744 - DNA, 38 bp, Artificial Sequence
  Synthetic oligonucleotide
gccgtatgattaagcgatctctggcatatggcatctga

SEQ ID NO: 2745 - DNA, 38 bp, Artificial Sequence
  Synthetic oligonucleotide
tctcgaagttccgtttagccccaaggtcgcgggcgtga

SEQ ID NO: 2746 - DNA, 37 bp, Artificial Sequence
  Synthetic oligonucleotide
aaccgggtgtccaaaccgtaatttaatgtttctggga

SEQ ID NO: 2747 - DNA, 37 bp, Artificial Sequence
  Synthetic oligonucleotide
aaccgggcgtccaaaccgtaatttaatgtttctggga

SEQ ID NO: 2748 - DNA, 35 bp, Artificial Sequence
  Synthetic oligonucleotide
ataattcgcgtccggtccttggaaataaacggcgt

SEQ ID NO: 2749 - DNA, 35 bp, Artificial Sequence
  Synthetic oligonucleotide
gggcggcctcgttttatcgggaaaaggaacaaagt

SEQ ID NO: 2750 - DNA, 35 bp, Artificial Sequence
  Synthetic oligonucleotide
gggcggcctcgttttatcgggaaaaggaacaatat

SEQ ID NO: 2751 - DNA, 35 bp, Artificial Sequence
  Synthetic oligonucleotide
gggcggcctcgttttatcgggaaaaggaacaatct

SEQ ID NO: 2752 - DNA, 36 bp, Artificial Sequence
  Synthetic oligonucleotide
tggctgctggacgcgtcttacagccgaccacatcaa

SEQ ID NO: 2753 - DNA, 38 bp, Artificial Sequence
  Synthetic oligonucleotide
tagccctaattgcgcttcttagcagggctcgtggttga

SEQ ID NO: 2754 - DNA, 35 bp, Artificial Sequence
  Synthetic oligonucleotide
tttaggctttagggtacgacagcaataggtacaaa

SEQ ID NO: 2755 - DNA, 38 bp, Artificial Sequence
  Synthetic oligonucleotide
atagataaatggggagagcgcgcattgaatgatggtga

SEQ ID NO: 2756 - DNA, 35 bp, Artificial Sequence
  Synthetic oligonucleotide
gagagaagtatttgttaagccacatagttttcata

SEQ ID NO: 2757 - DNA, 35 bp, Artificial Sequence
  Synthetic oligonucleotide
gagagaagtatttgttaagccacatagttttcatc

SEQ ID NO: 2758 - DNA, 36 bp, Artificial Sequence; identical to SEQ ID NO: 2732
  Synthetic oligonucleotide

SEQ ID NO: 2759 - DNA, 35 bp, Artificial Sequence
  Synthetic oligonucleotide
tcttattttagcaagatcttttatctaaataaact

SEQ ID NO: 2760 - DNA, 35 bp, Artificial Sequence
  Synthetic oligonucleotide
tcttattttagcaagatcttttatctaaatacctt

SEQ ID NO: 2761 - DNA, 35 bp, Artificial Sequence
  Synthetic oligonucleotide
tcttattttagcaagatcttttatctaaatactaa

SEQ ID NO: 2762 - DNA, 35 bp, Artificial Sequence
  Synthetic oligonucleotide
tcttattttagcaagatcttttatctaaatactag

SEQ ID NO: 2763 - DNA, 37 bp, Artificial Sequence
  Synthetic oligonucleotide
tgggaggttcagaagtctttggccttgatctgcagga

SEQ ID NO: 2764 - DNA, 36 bp, Artificial Sequence
  Synthetic oligonucleotide
accaccaaatccccaaccacttttccgcttatccca

SEQ ID NO: 2765 - DNA, 35 bp, Artificial Sequence
  Synthetic oligonucleotide
catgcagccccacaccgcttttatattgttttctc

SEQ ID NO: 2766 - DNA, 35 bp, Artificial Sequence
  Synthetic oligonucleotide
catgcataggctcactcctggaacactacctttat

SEQ ID NO: 2767 - DNA, 36 bp, Artificial Sequence
  Synthetic oligonucleotide
caacagtcatgtcaccctattatttgctttcattca

SEQ ID NO: 2768 - DNA, 36 bp, Artificial Sequence
  Synthetic oligonucleotide
catgccatatgtcccatcacttacctaccatcccta

SEQ ID NO: 2769 - DNA, 35 bp, Artificial Sequence
  Synthetic oligonucleotide
catgcgatccaatcctatagtccttggaccttata

SEQ ID NO: 2770 - DNA, 35 bp, Artificial Sequence
  Synthetic oligonucleotide
catgcgatccctcacacaactttcatcccaatacc

SEQ ID NO: 2771 - DNA, 35 bp, Artificial Sequence
  Synthetic oligonucleotide
cttgcgatattaactttccatcactttccttcttt

SEQ ID NO: 2772 - DNA, 35 bp, Artificial Sequence
  Synthetic oligonucleotide
catgcgccgatacccatttcccaattcctcttcaa

SEQ ID NO: 2773 - DNA, 35 bp, Artificial Sequence
  Synthetic oligonucleotide
cactgccacgtcaaatgcctctttcatttccattt

SEQ ID NO: 2774 - DNA, 36 bp, Artificial Sequence
  Synthetic oligonucleotide
cactgcggtcgagcctcctaattgttctcaccctta

SEQ ID NO: 2775 - DNA, 38 bp, Artificial Sequence
  Synthetic oligonucleotide
cgaacagtggtacacgacgtagtgcactctttttatga

SEQ ID NO: 2776 - DNA, 35 bp, Artificial Sequence
  Synthetic oligonucleotide
attgatctgcatgtgccattttcccacctttgttt

SEQ ID NO: 2777 - DNA, 35 bp, Artificial Sequence
  Synthetic oligonucleotide
gcacatgcgtactctcattaacttcattaccatcc

SEQ ID NO: 2778 - DNA, 35 bp, Artificial Sequence
  Synthetic oligonucleotide
gcgattacccactcttgtaaactaatttgcccatt

SEQ ID NO: 2779 - DNA, 38 bp, Artificial Sequence
  Synthetic oligonucleotide
gagacacgccactctcacgacacgttccttatttctga

SEQ ID NO: 2780 - DNA, 35 bp, Artificial Sequence; identical to SEQ ID NO: 452
  Synthetic oligonucleotide

SEQ ID NO: 2781 - DNA, 34 bp, Artificial Sequence
  Synthetic oligonucleotide
gccacaacacaattcttccgccatcactgcccaa

SEQ ID NO: 2782 - DNA, 35 bp, Artificial Sequence
  Synthetic oligonucleotide
gcctgaccacccgtataatttaccgcctaaacctt

SEQ ID NO: 2783 - DNA, 34 bp, Artificial Sequence; identical to SEQ ID NO: 161
  Synthetic oligonucleotide

SEQ ID NO: 2784 - DNA, 36 bp, Artificial Sequence
  Synthetic oligonucleotide
tacgactcatacttccattccgcctaaccttttcca

SEQ ID NO: 2785 - DNA, 35 bp, Artificial Sequence
  Synthetic oligonucleotide
gcgtatcaccatggctcacttttcctatctccttt

SEQ ID NO: 2786 - DNA, 35 bp, Artificial Sequence
  Synthetic oligonucleotide
ggccacgtaacagctactcaacgcgcaacactaac

SEQ ID NO: 2787 - DNA, 36 bp, Artificial Sequence
  Synthetic oligonucleotide
gcggccacactttgccttcttattcgttaattccta

SEQ ID NO: 2788 - DNA, 35 bp, Artificial Sequence
  Synthetic oligonucleotide
tgctgtcaacgcgaagatctttctcttttattctt

SEQ ID NO: 2789 - DNA, 35 bp, Artificial Sequence
  Synthetic oligonucleotide
tatgcggcgaacgccttctatttcctggttctctt

SEQ ID NO: 2790 - DNA, 35 bp, Artificial Sequence
  Synthetic oligonucleotide
tatgccccacgataatttcctctttttgcatattt

SEQ ID NO: 2791 - DNA, 36 bp, Artificial Sequence; identical to SEQ ID NO: 570
  Synthetic oligonucleotide

SEQ ID NO: 2792 - DNA, 36 bp, Artificial Sequence
  Synthetic oligonucleotide
acaccacgcctctgccggtggacgtactgcccatta

SEQ ID NO: 2793 - DNA, 38 bp, Artificial Sequence
  Synthetic oligonucleotide
gccacgtagaacacccatcctgatccatacaatactga

SEQ ID NO: 2794 - DNA, 35 bp, Artificial Sequence; identical to SEQ ID NO: 778
  Synthetic oligonucleotide

SEQ ID NO: 2795 - DNA, 36 bp, Artificial Sequence
  Synthetic oligonucleotide
acgcacgtgcagtcgtatcccgtttcttgcgcttta

SEQ ID NO: 2796 - DNA, 35 bp, Artificial Sequence
  Synthetic oligonucleotide
gacctagaagagggcgcttaaaattgggagtggtt

SEQ ID NO: 2797 - DNA, 35 bp, Artificial Sequence
  Synthetic oligonucleotide
atgcactacgcagatgcaaactatctttcgccttc

SEQ ID NO: 2798 - DNA, 35 bp, Artificial Sequence; identical to SEQ ID NO: 429
  Synthetic oligonucleotide

SEQ ID NO: 2799 - DNA, 38 bp, Artificial Sequence
  Synthetic oligonucleotide
gatgtagctgccacgagtgcgtatactcctttatctga

SEQ ID NO: 2800 - DNA, 36 bp, Artificial Sequence
  Synthetic oligonucleotide
gcccagctgcggtcacttgcccagccattccaccaa

SEQ ID NO: 2801 - DNA, 35 bp, Artificial Sequence; identical to SEQ ID NO: 452
  Synthetic oligonucleotide

SEQ ID NO: 2802 - DNA, 34 bp, Artificial Sequence; identical to SEQ ID NO: 161
  Synthetic oligonucleotide

SEQ ID NO: 2803 - DNA, 35 bp, Artificial Sequence
  Synthetic oligonucleotide
gccgagtcaatcaagctcggattacagtgtttacc

SEQ ID NO: 2804 - DNA, 35 bp, Artificial Sequence
  Synthetic oligonucleotide
tactgcaggtacagagtatcttcatccacctccat

SEQ ID NO: 2805 - DNA, 36 bp, Artificial Sequence
  Synthetic oligonucleotide
ggtgccgttgaggtatacggaccgtgcaggccatca

SEQ ID NO: 2806 - DNA, 36 bp, Artificial Sequence; identical to SEQ ID NO: 706
  Synthetic oligonucleotide

SEQ ID NO: 2807 - DNA, 35 bp, Artificial Sequence
  Synthetic oligonucleotide
gtcgtgcgaggtcaagtactcctattctctctaaa

SEQ ID NO: 2808 - DNA, 38 bp, Artificial Sequence
  Synthetic oligonucleotide
tggagggccgagtggtgggggtttgagaagcattatga

SEQ ID NO: 2809 - DNA, 37 bp, Artificial Sequence
  Synthetic oligonucleotide
tcacgacgtacaaaggttggcgtacttaccttactga

SEQ ID NO: 2810 - DNA, 35 bp, Artificial Sequence
  Synthetic oligonucleotide
tgcactgtaggtcatttcgtttacttgccaccatc

SEQ ID NO: 2811 - DNA, 36 bp, Artificial Sequence
  Synthetic oligonucleotide
tgtaacagcagtcgcggggaattattggctcttgaa

SEQ ID NO: 2812 - DNA, 36 bp, Artificial Sequence
  Synthetic oligonucleotide
tgtacaagtcagacgcgcccaaccctgtttacacta

SEQ ID NO: 2813 - DNA, 38 bp, Artificial Sequence
  Synthetic oligonucleotide
tgtacacctgcaatgcgtggtattactttgttccttga

SEQ ID NO: 2814 - DNA, 38 bp, Artificial Sequence
  Synthetic oligonucleotide
tccacatgccgttgaactctttattccctttaccttga

SEQ ID NO: 2815 - DNA, 35 bp, Artificial Sequence
  Synthetic oligonucleotide
ttggtacccgatagaatctagtttttgtagccaag

SEQ ID NO: 2816 - DNA, 35 bp, Artificial Sequence
  Synthetic oligonucleotide
acggacatgcgagcaacaatgaacgtctttttttc

SEQ ID NO: 2817 - DNA, 36 bp, Artificial Sequence
  Synthetic oligonucleotide
aaccacgaaggtacggacacactttacataccctta

SEQ ID NO: 2818 - DNA, 38 bp, Artificial Sequence
  Synthetic oligonucleotide
atgtacgcggtacccatcacacactatgtgtcccttga

SEQ ID NO: 2819 - DNA, 35 bp, Artificial Sequence
  Synthetic oligonucleotide
agtcacacaagcctccgattcattcttctaaacat

SEQ ID NO: 2820 - DNA, 38 bp, Artificial Sequence
  Synthetic oligonucleotide
catgcgcaggtatcttgctacactattctcccgtttga

SEQ ID NO: 2821 - DNA, 36 bp, Artificial Sequence
  Synthetic oligonucleotide
atgcgcacccgctatctacccgtgacacacgcctta

SEQ ID NO: 2822 - DNA, 35 bp, Artificial Sequence
  Synthetic oligonucleotide
atctcgaaccaccaccttccatcccttatgttgtc

SEQ ID NO: 2823 - DNA, 35 bp, Artificial Sequence
  Synthetic oligonucleotide
gcgaaccggaacttaatatccttgtaaccgctatc

SEQ ID NO: 2824 - DNA, 36 bp, Artificial Sequence
  Synthetic oligonucleotide
gcaacccgacctcgctccaaccgcttacgactccta

SEQ ID NO: 2825 - DNA, 36 bp, Artificial Sequence
  Synthetic oligonucleotide
gcaccccacatcccacgatcccatggatacccgcca

SEQ ID NO: 2826 - DNA, 36 bp, Artificial Sequence
  Synthetic oligonucleotide
gccaacctcaccaccggtacgccttatcgctaatta

SEQ ID NO: 2827 - DNA, 35 bp, Artificial Sequence
  Synthetic oligonucleotide
tcagtaccgccattcccaaaaatttttccccaaca

SEQ ID NO: 2828 - DNA, 35 bp, Artificial Sequence
  Synthetic oligonucleotide
tgaagccagctgacgtacatccacatattccctac

SEQ ID NO: 2829 - DNA, 36 bp, Artificial Sequence
  Synthetic oligonucleotide
tcaaccaactcaccctcatttactcgcataacatta

SEQ ID NO: 2830 - DNA, 35 bp, Artificial Sequence
  Synthetic oligonucleotide
tatgcccgcctgactctcttattactggttccgac

SEQ ID NO: 2831 - DNA, 36 bp, Artificial Sequence
  Synthetic oligonucleotide
actgctggcaccgcaatctacctaaagtttccgtta

SEQ ID NO: 2832 - DNA, 35 bp, Artificial Sequence
  Synthetic oligonucleotide
accacgcactcaggttcatgcatcttgaactttac

SEQ ID NO: 2833 - DNA, 36 bp, Artificial Sequence
  Synthetic oligonucleotide
gaccgtcgcaggccgtggctagcaggacgttggcta

SEQ ID NO: 2834 - DNA, 38 bp, Artificial Sequence
  Synthetic oligonucleotide
gacgaacgtgctgttggtattttttgaactcttattga

SEQ ID NO: 2835 - DNA, 37 bp, Artificial Sequence
  Synthetic oligonucleotide
gacatcctggaggtcctaactgcggtctcacacttga

SEQ ID NO: 2836 - DNA, 35 bp, Artificial Sequence
  Synthetic oligonucleotide
atgccggggtcacgacgttaccgcactccatctat

SEQ ID NO: 2837 - DNA, 35 bp, Artificial Sequence
  Synthetic oligonucleotide
atcagcaacgcccagtggtgcaagctttacccttt

SEQ ID NO: 2838 - DNA, 36 bp, Artificial Sequence
  Synthetic oligonucleotide
gactaccgtacgtgcatggcccccagttacacaata

SEQ ID NO: 2839 - DNA, 35 bp, Artificial Sequence
  Synthetic oligonucleotide
tacctcaaccgcgaactttgctacgttttgtaggg

SEQ ID NO: 2840 - DNA, 35 bp, Artificial Sequence
  Synthetic oligonucleotide
tacgctgtcgtgtgaggccctaccgctcccctatc

SEQ ID NO: 2841 - DNA, 35 bp, Artificial Sequence
  Synthetic oligonucleotide
gtcacggaagcagttacgaacgatgcccttccatc

SEQ ID NO: 2842 - DNA, 36 bp, Artificial Sequence; identical to SEQ ID NO: 2811
  Synthetic oligonucleotide

SEQ ID NO: 2843 - DNA, 35 bp, Artificial Sequence
  Synthetic oligonucleotide
ttgtgacgtctcgtgcgcattaccggttaatattt

SEQ ID NO: 2844 - DNA, 35 bp, Artificial Sequence; identical to SEQ ID NO: 2815
  Synthetic oligonucleotide

SEQ ID NO: 2845 - DNA, 35 bp, Artificial Sequence
  Synthetic oligonucleotide
tttaacgtagtgagtcaccattgatcctttaattt

SEQ ID NO: 2846 - DNA, 35 bp, Artificial Sequence
  Synthetic oligonucleotide
acccacgcctaccctaatccttgtctgttattttc

SEQ ID NO: 2847 - DNA, 36 bp, Artificial Sequence
  Synthetic oligonucleotide
catgccgaataatctctttcgttcctggtcctttta

SEQ ID NO: 2848 - DNA, 37 bp, Artificial Sequence
  Synthetic oligonucleotide
catgccgccaaaccacactgttccgtcttacttatga

SEQ ID NO: 2849 - DNA, 35 bp, Artificial Sequence
  Synthetic oligonucleotide
catgcgaacaacctttaccattcactagcacccct

SEQ ID NO: 2850 - DNA, 38 bp, Artificial Sequence
  Synthetic oligonucleotide
catgcgacacgctctatcgctttcacatcttcgcttga

SEQ ID NO: 2851 - DNA, 35 bp, Artificial Sequence; identical to SEQ ID NO: 2770
  Synthetic oligonucleotide

SEQ ID NO: 2852 - DNA, 35 bp, Artificial Sequence
  Synthetic oligonucleotide
catgcgcactttcctcacatgataccctgcatgac

SEQ ID NO: 2853 - DNA, 35 bp, Artificial Sequence
  Synthetic oligonucleotide
catgcgcatccaatcacactttttaatttcatttc

SEQ ID NO: 2854 - DNA, 35 bp, Artificial Sequence
  Synthetic oligonucleotide
atgcctagcagccaagcaatgcctttcatttattc

SEQ ID NO: 2855 - DNA, 36 bp, Artificial Sequence
  Synthetic oligonucleotide
gccgcagccatcatctacgcttcacactcatcacca

SEQ ID NO: 2856 - DNA, 36 bp, Artificial Sequence
  Synthetic oligonucleotide
ggtacgcaggcgcgatttgtacatttttgatcctga

SEQ ID NO: 2857 - DNA, 38 bp, Artificial Sequence
  Synthetic oligonucleotide
tctaacgtactatcatgtgccacgccttcatttcctga

SEQ ID NO: 2858 - DNA, 35 bp, Artificial Sequence
  Synthetic oligonucleotide
tcaactgccaccgaccccaacccgcgacccatcct

SEQ ID NO: 2859 - DNA, 36 bp, Artificial Sequence; identical to SEQ ID NO: 368
  Synthetic oligonucleotide

SEQ ID NO: 2860 - DNA, 36 bp, Artificial Sequence
  Synthetic oligonucleotide
cgcgagccagggtactgcctgcggtctaaacaataa

SEQ ID NO: 2861 - DNA, 36 bp, Artificial Sequence; identical to SEQ ID NO: 151
  Synthetic oligonucleotide

SEQ ID NO: 2862 - DNA, 35 bp, Artificial Sequence; identical to SEQ ID NO: 326
  Synthetic oligonucleotide

SEQ ID NO: 2863 - DNA, 35 bp, Artificial Sequence; identical to SEQ ID NO: 181
  Synthetic oligonucleotide

SEQ ID NO: 2864 - DNA, 38 bp, Artificial Sequence; identical to SEQ ID NO: 852
  Synthetic oligonucleotide

SEQ ID NO: 2865 - DNA, 36 bp, Artificial Sequence; identical to SEQ ID NO: 184
  Synthetic oligonucleotide

SEQ ID NO: 2866 - DNA, 36 bp, Artificial Sequence
  Synthetic oligonucleotide
tgggtgtcgtactggtaccaaggagtgcgaaatcta

SEQ ID NO: 2867 - DNA, 35 bp, Artificial Sequence; identical to SEQ ID NO: 272
  Synthetic oligonucleotide

SEQ ID NO: 2868 - DNA, 35 bp, Artificial Sequence
  Synthetic oligonucleotide
acgcgcataaaccaatcactaccgaccacttattc

SEQ ID NO: 2869 - DNA, 35 bp, Artificial Sequence
  Synthetic oligonucleotide
acgtcaggcataaattcttcaaactcttactatca

SEQ ID NO: 2870 - DNA, 36 bp, Artificial Sequence
  Synthetic oligonucleotide
catgcccggaccattattattcgcttaccattccca

SEQ ID NO: 2871 - DNA, 37 bp, Artificial Sequence
  Synthetic oligonucleotide
catgccgaccactgttccttttacctcttatacctga

SEQ ID NO: 2872 - DNA, 35 bp, Artificial Sequence
  Synthetic oligonucleotide
catgcgaacagacgaatgattcttacaaccgcaac

SEQ ID NO: 2873 - DNA, 35 bp, Artificial Sequence
  Synthetic oligonucleotide
cccgtccgcaggcatccacgtttatgccttttatc

SEQ ID NO: 2874 - DNA, 36 bp, Artificial Sequence
  Synthetic oligonucleotide
cacgcgaccctcattaacatcatctaacccaatcca

SEQ ID NO: 2875 - DNA, 35 bp, Artificial Sequence
  Synthetic oligonucleotide
catgcgccaattttactgtacatttctttttttat

SEQ ID NO: 2876 - DNA, 35 bp, Artificial Sequence
  Synthetic oligonucleotide
catgcgcgccgacctactcgcttaatctcacgttt

SEQ ID NO: 2877 - DNA, 35 bp, Artificial Sequence
  Synthetic oligonucleotide
catggcgaccctcaatctcacattttacctcttct

SEQ ID NO: 2878 - DNA, 35 bp, Artificial Sequence
  Synthetic oligonucleotide
gacggactgcgtatcgcatagtttatccttttttt

SEQ ID NO: 2879 - DNA, 35 bp, Artificial Sequence
  Synthetic oligonucleotide
gcccaccatatcgcaatcatattcctcgccttgtt

SEQ ID NO: 2880 - DNA, 35 bp, Artificial Sequence
  Synthetic oligonucleotide
gcgcatgtcaaccttacctctattggcccttattc

SEQ ID NO: 2881 - DNA, 35 bp, Artificial Sequence
  Synthetic oligonucleotide
gcatccagtccataactcaatctcacctgtaattc

SEQ ID NO: 2882 - DNA, 35 bp, Artificial Sequence
  Synthetic oligonucleotide
gccgcatacccctgtaatttcgtaacctacaccca

SEQ ID NO: 2883 - DNA, 34 bp, Artificial Sequence
  Synthetic oligonucleotide
gcgcaactccgactatcactgccttaccaatcac

SEQ ID NO: 2884 - DNA, 36 bp, Artificial Sequence
  Synthetic oligonucleotide
gcgacgcctctgacctacatataactttgatagtaa

SEQ ID NO: 2885 - DNA, 35 bp, Artificial Sequence
  Synthetic oligonucleotide
gcgacgcgtgaacacccttattctgtaatcttttt

SEQ ID NO: 2886 - DNA, 35 bp, Artificial Sequence
  Synthetic oligonucleotide
gtactgtcaacccgatctttgtttgtatttatttt

SEQ ID NO: 2887 - DNA, 38 bp, Artificial Sequence
  Synthetic oligonucleotide
gcgcggtactcattatccttatatcatcttacatttga

SEQ ID NO: 2888 - DNA, 37 bp, Artificial Sequence
  Synthetic oligonucleotide
tatgcgagcccatttttcacctttgctatttcttaga

SEQ ID NO: 2889 - DNA, 35 bp, Artificial Sequence
  Synthetic oligonucleotide
tcctccagcacattctaccacactaccacattcat

SEQ ID NO: 2890 - DNA, 35 bp, Artificial Sequence
  Synthetic oligonucleotide
tatgcggtgccacttctctattacttctattactt

SEQ ID NO: 2891 - DNA, 36 bp, Artificial Sequence
  Synthetic oligonucleotide
tcatgcagcctagtatctatcctaccatattattca

SEQ ID NO: 2892 - DNA, 35 bp, Artificial Sequence
  Synthetic oligonucleotide
tgacggacagtgcatgcgttatacttattctctat

SEQ ID NO: 2893 - DNA, 38 bp, Artificial Sequence
  Synthetic oligonucleotide
aagcctggccgtggtgctgcagtttattccgttagtga

SEQ ID NO: 2894 - DNA, 36 bp, Artificial Sequence; identical to SEQ ID NO: 2860
  Synthetic oligonucleotide

SEQ ID NO: 2895 - DNA, 36 bp, Artificial Sequence; identical to SEQ ID NO: 151
  Synthetic oligonucleotide

SEQ ID NO: 2896 - DNA, 36 bp, Artificial Sequence
  Synthetic oligonucleotide
gcattcgcgtactgtggacaacctatatccgggtaa

SEQ ID NO: 2897 - DNA, 36 bp, Artificial Sequence
  Synthetic oligonucleotide
gcaactatcgcgagcgccttcaagattagcgtgtca

SEQ ID NO: 2898 - DNA, 38 bp, Artificial Sequence; identical to SEQ ID NO: 169
  Synthetic oligonucleotide

SEQ ID NO: 2899 - DNA, 38 bp, Artificial Sequence
  Synthetic oligonucleotide
gtgcggggccacaggtgatagcaatgcatgccctatga

SEQ ID NO: 2900 - DNA, 37 bp, Artificial Sequence
  Synthetic oligonucleotide
tcaccccaagcagtcattgcctacaggagtctggtga

SEQ ID NO: 2901 - DNA, 37 bp, Artificial Sequence
  Synthetic oligonucleotide
tgcagttagtgcaatgaatatctcggacacgcggaga

SEQ ID NO: 2902 - DNA, 35 bp, Artificial Sequence
  Synthetic oligonucleotide
tccgcagacagccgggggtcaggactacggctacg

SEQ ID NO: 2903 - DNA, 37 bp, Artificial Sequence
  Synthetic oligonucleotide
ttacagctactctgcgctccaagtggacactttacga

SEQ ID NO: 2904 - DNA, 36 bp, Artificial Sequence
  Synthetic oligonucleotide
ttagcatcactgacttggatacatacagcatgtcga

SEQ ID NO: 2905 - DNA, 35 bp, Artificial Sequence
  Synthetic oligonucleotide
agcacgactgcaatccacatccgttcttattcctt

SEQ ID NO: 2906 - DNA, 37 bp, Artificial Sequence
  Synthetic oligonucleotide
aatgcgcacatctgtttttgtaccttagaatgtttga

SEQ ID NO: 2907 - DNA, 35 bp, Artificial Sequence; identical to SEQ ID NO: 2869
  Synthetic oligonucleotide

SEQ ID NO: 2908 - DNA, 36 bp, Artificial Sequence
  Synthetic oligonucleotide
catgcaccactcgcacattccaccacaatctataca

SEQ ID NO: 2909 - DNA, 35 bp, Artificial Sequence
  Synthetic oligonucleotide
ctgccactagccgcccatactatccacaccataat

SEQ ID NO: 2910 - DNA, 35 bp, Artificial Sequence
  Synthetic oligonucleotide
ccatgcgcggtcacacataccagtccttaccattt

SEQ ID NO: 2911 - DNA, 35 bp, Artificial Sequence
  Synthetic oligonucleotide
catgccgacacaccacttttttccgaccgacttcc

SEQ ID NO: 2912 - DNA, 35 bp, Artificial Sequence
  Synthetic oligonucleotide
catgccgcctttcgacttccatatcccaacacgac

SEQ ID NO: 2913 - DNA, 35 bp, Artificial Sequence; identical to SEQ ID NO: 194
  Synthetic oligonucleotide

SEQ ID NO: 2914 - DNA, 35 bp, Artificial Sequence; identical to SEQ ID NO: 195
  Synthetic oligonucleotide

SEQ ID NO: 2915 - DNA, 35 bp, Artificial Sequence
  Synthetic oligonucleotide
cttgccgatcccgctccctagttcccttgcccact

SEQ ID NO: 2916 - DNA, 36 bp, Artificial Sequence
  Synthetic oligonucleotide
cacgcatgtctgcgctcgtatcttttcaccctatga

SEQ ID NO: 2917 - DNA, 38 bp, Artificial Sequence
  Synthetic oligonucleotide
cactgcggtcaacacccaccaacctccgaccttactga

SEQ ID NO: 2918 - DNA, 38 bp, Artificial Sequence
  Synthetic oligonucleotide
catgcgtacgccactttcgcctactctaacatatctga

SEQ ID NO: 2919 - DNA, 35 bp, Artificial Sequence
  Synthetic oligonucleotide
cagtctgcgcgaccctttctgttccttcatcccca

SEQ ID NO: 2920 - DNA, 35 bp, Artificial Sequence
  Synthetic oligonucleotide
cattgcgccttctattttattttccttatatttgt

SEQ ID NO: 2921 - DNA, 38 bp, Artificial Sequence
  Synthetic oligonucleotide
cattgcggccattacccctctaccgttaccctttttga

SEQ ID NO: 2922 - DNA, 35 bp, Artificial Sequence
  Synthetic oligonucleotide
gcacacacctgcggagcaccactccaaattaccca

SEQ ID NO: 2923 - DNA, 35 bp, Artificial Sequence
  Synthetic oligonucleotide
gcacactacgtttaccctggcccttctaattgttt

SEQ ID NO: 2924 - DNA, 35 bp, Artificial Sequence
  Synthetic oligonucleotide
gcactgccattgatttcttcccacttcacactctt

SEQ ID NO: 2925 - DNA, 36 bp, Artificial Sequence
  Synthetic oligonucleotide
gcgaacactgatcttaactaacgcccgcccaattta

SEQ ID NO: 2926 - DNA, 36 bp, Artificial Sequence
  Synthetic oligonucleotide
gcacccccaatgaccgccatcaaaccatatattcca

SEQ ID NO: 2927 - DNA, 36 bp, Artificial Sequence
  Synthetic oligonucleotide
gcgcaaccatcactataacccatttacctgttttca

SEQ ID NO: 2928 - DNA, 38 bp, Artificial Sequence
  Synthetic oligonucleotide
gcgcaccacacttgagttctttaactttccctttatga

SEQ ID NO: 2929 - DNA, 35 bp, Artificial Sequence
  Synthetic oligonucleotide
gccgacgtacctgctgggtctctctattcattttt

SEQ ID NO: 2930 - DNA, 35 bp, Artificial Sequence
  Synthetic oligonucleotide
tacgccgtccaccatcctcttctatatacctaacc

SEQ ID NO: 2931 - DNA, 35 bp, Artificial Sequence
  Synthetic oligonucleotide
tactacgaaccatcccactctttgcacctgttttc

SEQ ID NO: 2932 - DNA, 34 bp, Artificial Sequence
  Synthetic oligonucleotide
tcatgcgcggtacacatttcttaatcacttttct

SEQ ID NO: 2933 - DNA, 35 bp, Artificial Sequence
  Synthetic oligonucleotide
tgcgggcattggtgcaatcttaacttattctttat

SEQ ID NO: 2934 - DNA, 35 bp, Artificial Sequence
  Synthetic oligonucleotide
tggtagtgctgcatcaccgatcatccttttacatt

SEQ ID NO: 2935 - DNA, 37 bp, Artificial Sequence
  Synthetic oligonucleotide
tccgcgactgttcatcccccatcccaacataacccga

SEQ ID NO: 2936 - DNA, 38 bp, Artificial Sequence
  Synthetic oligonucleotide
tgtgaacgtcactgcaccctaaactaatattcccttga

SEQ ID NO: 2937 - DNA, 36 bp, Artificial Sequence
  Synthetic oligonucleotide
ttgacaactgccactaccaactgaacccgctactta

SEQ ID NO: 2938 - DNA, 38 bp, Artificial Sequence
  Synthetic oligonucleotide
ttgtcaagcgctatccaccatttctcttttatctatga

SEQ ID NO: 2939 - DNA, 35 bp, Artificial Sequence
  Synthetic oligonucleotide
caatgcgacgaggcttctatgtcatgaactaagct

SEQ ID NO: 2940 - DNA, 37 bp, Artificial Sequence
  Synthetic oligonucleotide
ccgaacggtcgcaaagtggtgtagcctctaatccgga

SEQ ID NO: 2941 - DNA, 35 bp, Artificial Sequence; identical to SEQ ID NO: 2877
  Synthetic oligonucleotide

SEQ ID NO: 2942 - DNA, 38 bp, Artificial Sequence
  Synthetic oligonucleotide
accggaatgtacatgccctggtttttgttattatttga

SEQ ID NO: 2943 - DNA, 35 bp, Artificial Sequence
  Synthetic oligonucleotide
accatgcgcccaccactattttttccacttcctta

SEQ ID NO: 2944 - DNA, 37 bp, Artificial Sequence
  Synthetic oligonucleotide
acggagtaccctgcccactatataacttaaaccttga

SEQ ID NO: 2945 - DNA, 35 bp, Artificial Sequence
  Synthetic oligonucleotide
acgggcgtgtcgcactgtctgtcactggcttattc

SEQ ID NO: 2946 - DNA, 35 bp, Artificial Sequence
  Synthetic oligonucleotide
agacggtgggtgggtgggtggtgctgcagtctacc

SEQ ID NO: 2947 - DNA, 35 bp, Artificial Sequence
  Synthetic oligonucleotide
catgccgcaccccaacacgtaccatttcattattt

SEQ ID NO: 2948 - DNA, 36 bp, Artificial Sequence
  Synthetic oligonucleotide
catgcgggcatccttagcttaacctcaattccatta

SEQ ID NO: 2949 - DNA, 35 bp, Artificial Sequence
  Synthetic oligonucleotide
catggccattctaccctccattccattccttgcct

SEQ ID NO: 2950 - DNA, 35 bp, Artificial Sequence
  Synthetic oligonucleotide
cgttcggtacgcagtcatttcactctatcttgttc

SEQ ID NO: 2951 - DNA, 37 bp, Artificial Sequence
  Synthetic oligonucleotide
aacccacgagttgttggtccacgcctcgttatcacga

SEQ ID NO: 2952 - DNA, 36 bp, Artificial Sequence
  Synthetic oligonucleotide
aacccatgcctgccccatgtgcattcaggcagagca

SEQ ID NO: 2953 - DNA, 36 bp, Artificial Sequence
  Synthetic oligonucleotide
accgccacagtcatcaacccacctggccgacgacga

SEQ ID NO: 2954 - DNA, 36 bp, Artificial Sequence
  Synthetic oligonucleotide
gacaacgcaaccgcaggctcatggagccaatatgta

SEQ ID NO: 2955 - DNA, 37 bp, Artificial Sequence
  Synthetic oligonucleotide
gacaacacgtcgcatgatcttaaaagaggacctagga

SEQ ID NO: 2956 - DNA, 38 bp, Artificial Sequence
  Synthetic oligonucleotide
gagtggtcgccactcacaacgatgcggtatccccttga

SEQ ID NO: 2957 - DNA, 37 bp, Artificial Sequence
  Synthetic oligonucleotide
gcgtggtggtccgccggtggtgagtcgatgaactgga

SEQ ID NO: 2958 - DNA, 36 bp, Artificial Sequence
  Synthetic oligonucleotide
gtgatcgatagcgagtgttgagctgtcgagagtgga

SEQ ID NO: 2959 - DNA, 36 bp, Artificial Sequence
  Synthetic oligonucleotide
tcacacaccgcgtggctcggacgacaagtagtccta

SEQ ID NO: 2960 - DNA, 35 bp, Artificial Sequence
  Synthetic oligonucleotide
tgaacctgcacagctgttaagaggtggcttacgta

SEQ ID NO: 2961 - DNA, 35 bp, Artificial Sequence
  Synthetic oligonucleotide
actgaccacagctacgtaagcaataaccgatcgtt

SEQ ID NO: 2962 - DNA, 35 bp, Artificial Sequence
  Synthetic oligonucleotide
aagagtacgggcatgagtaataagggagtagccgt

SEQ ID NO: 2963 - DNA, 35 bp, Artificial Sequence
  Synthetic oligonucleotide
agatcgcggtcaatcggtgggtagttaggatcggg

SEQ ID NO: 2964 - DNA, 35 bp, Artificial Sequence
  Synthetic oligonucleotide
gaacacacgtcgatcgccactgagagcagatgtca

SEQ ID NO: 2965 - DNA, 35 bp, Artificial Sequence
  Synthetic oligonucleotide
atcggaggccgtatcaccatatcccaccaccactt

SEQ ID NO: 2966 - DNA, 34 bp, Artificial Sequence
  Synthetic oligonucleotide
cttattttagcaagatcttttatctaaatacaat

SEQ ID NO: 2967 - DNA, 36 bp, Artificial Sequence
  Synthetic oligonucleotide
gacaaacgtagtgctgaacatggcgttctggtccaa

SEQ ID NO: 2968 - DNA, 35 bp, Artificial Sequence
  Synthetic oligonucleotide
ataccgggacaggcgacagaagggtgaaccaatgt

SEQ ID NO: 2969 - DNA, 37 bp, Artificial Sequence
  Synthetic oligonucleotide
gagtggacgtggacgcgaaacgggtcaggcataacga

SEQ ID NO: 2970 - DNA, 36 bp, Artificial Sequence
  Synthetic oligonucleotide
taccacgtggcgcctgacgacttacgcaactgggga

SEQ ID NO: 2971 - DNA, 36 bp, Artificial Sequence
  Synthetic oligonucleotide
tacagccgacatgaacatcccttaatcccaccctaa

SEQ ID NO: 2972 - DNA, 37 bp, Artificial Sequence
  Synthetic oligonucleotide
tgataccgcgcaacgagacttaccacgtcaggatgga

SEQ ID NO: 2973 - DNA, 36 bp, Artificial Sequence
  Synthetic oligonucleotide
atggtgggagcaccgacgtaggaggcctatggcgta

SEQ ID NO: 2974 - DNA, 37 bp, Artificial Sequence; identical to SEQ ID NO: 2955
  Synthetic oligonucleotide

SEQ ID NO: 2975 - DNA, 38 bp, Artificial Sequence
  Synthetic oligonucleotide
gtgaacgtcgctagaaacgatggtgtaaatagtcttga

SEQ ID NO: 2976 - DNA, 36 bp, Artificial Sequence; identical to SEQ ID NO: 2958
  Synthetic oligonucleotide

SEQ ID NO: 2977 - DNA, 37 bp, Artificial Sequence
  Synthetic oligonucleotide
aacacgcaacacacaactctcggcaaatccagcgcga

SEQ ID NO: 2978 - DNA, 37 bp, Artificial Sequence
  Synthetic oligonucleotide
acgacgcaccctgccactatcgtagatactccgacta

SEQ ID NO: 2979 - DNA, 36 bp, Artificial Sequence
  Synthetic oligonucleotide
gaccaatggaccggggactactctgagaaagcgcga

SEQ ID NO: 2980 - DNA, 36 bp, Artificial Sequence
  Synthetic oligonucleotide
agtggaacgcaccgaagttacctacctgagatggga

SEQ ID NO: 2981 - DNA, 37 bp, Artificial Sequence
  Synthetic oligonucleotide
gacgacggggatcctgacaattcctgactaagcgcga

SEQ ID NO: 2982 - DNA, 35 bp, Artificial Sequence
  Synthetic oligonucleotide
gacccgcccagtaagcacacacacagcccaaattt

SEQ ID NO: 2983 - DNA, 37 bp, Artificial Sequence
  Synthetic oligonucleotide
gagcggactcgaatagaactccgcaacaccagcgcga

SEQ ID NO: 2984 - DNA, 37 bp, Artificial Sequence
  Synthetic oligonucleotide
gagacgaggccgggatcatgctagggatcggacagga

SEQ ID NO: 2985 - DNA, 36 bp, Artificial Sequence
  Synthetic oligonucleotide
taccgacaccctcgtgttcccaaacaaggagacgga

SEQ ID NO: 2986 - DNA, 37 bp, Artificial Sequence
  Synthetic oligonucleotide
ggatacgcaccttaaggagggacgaataaaagcgcga

SEQ ID NO: 2987 - DNA, 36 bp, Artificial Sequence
  Synthetic oligonucleotide
tagcacagtggtgcttacggaacatcaccagcgcga

SEQ ID NO: 2988 - DNA, 37 bp, Artificial Sequence
  Synthetic oligonucleotide
tagtcggtcggcctgccgatgcgtcaaggtagcgcga

SEQ ID NO: 2989 - DNA, 37 bp, Artificial Sequence
  Synthetic oligonucleotide
taggaatcaccggctcgggcgaggccgggaagcgcga

SEQ ID NO: 2990 - DNA, 37 bp, Artificial Sequence
  Synthetic oligonucleotide
tgagccgcaaccggcaaacaaggcttcaacagcgcga

SEQ ID NO: 2991 - DNA, 36 bp, Artificial Sequence
  Synthetic oligonucleotide
aacaccacaccgccgctgatccggatggaacctcga

SEQ ID NO: 2992 - DNA, 35 bp, Artificial Sequence; identical to SEQ ID NO: 2962
  Synthetic oligonucleotide

SEQ ID NO: 2993 - DNA, 36 bp, Artificial Sequence
  Synthetic oligonucleotide
acacgtgccccaccaatatgcgataagactttgtta

SEQ ID NO: 2994 - DNA, 36 bp, Artificial Sequence
  Synthetic oligonucleotide
gacaccgaagacgaggctaaagagagaagtgccata

SEQ ID NO: 2995 - DNA, 35 bp, Artificial Sequence
  Synthetic oligonucleotide
atcgccgcacacctgccactcactcttccatcgct

SEQ ID NO: 2996 - DNA, 34 bp, Artificial Sequence; identical to SEQ ID NO: 2966
  Synthetic oligonucleotide

SEQ ID NO: 2997 - DNA, 36 bp, Artificial Sequence
  Synthetic oligonucleotide
gactaacgccgcttatcctcaacgcctaaccttgtt

SEQ ID NO: 2998 - DNA, 37 bp, Artificial Sequence
  Synthetic oligonucleotide
gagtggtcgcctgcaggtgcattccatccagctccga

SEQ ID NO: 2999 - DNA, 35 bp, Artificial Sequence
  Synthetic oligonucleotide
gtggaggctgcaatacggtgcaagagagcttaggg

SEQ ID NO: 3000 - DNA, 37 bp, Artificial Sequence
  Synthetic oligonucleotide
gtcaccgcatgcgggtcaagccctcaactttacttga

SEQ ID NO: 3001 - DNA, 37 bp, Artificial Sequence
  Synthetic oligonucleotide
taagtcgcgccccagtcagtgattgatacagatagga

SEQ ID NO: 3002 - DNA, 36 bp, Artificial Sequence
  Synthetic oligonucleotide
tcaacatgcgtgcaagtggcaccgttctcgtttcga

SEQ ID NO: 3003 - DNA, 34 bp, Artificial Sequence
  Synthetic oligonucleotide
tcttatttagcaagatcttttatctaaatacaat

SEQ ID NO: 3004 - DNA, 37 bp, Artificial Sequence; identical to SEQ ID NO: 2977
  Synthetic oligonucleotide

SEQ ID NO: 3005 - DNA, 37 bp, Artificial Sequence; identical to SEQ ID NO: 2978
  Synthetic oligonucleotide

SEQ ID NO: 3006 - DNA, 36 bp, Artificial Sequence; identical to SEQ ID NO: 2979
  Synthetic oligonucleotide

SEQ ID NO: 3007 - DNA, 37 bp, Artificial Sequence; identical to SEQ ID NO: 2981
  Synthetic oligonucleotide

SEQ ID NO: 3008 - DNA, 37 bp, Artificial Sequence; identical to SEQ ID NO: 2983
  Synthetic oligonucleotide

SEQ ID NO: 3009 - DNA, 37 bp, Artificial Sequence; identical to SEQ ID NO: 2984
  Synthetic oligonucleotide

SEQ ID NO: 3010 - DNA, 36 bp, Artificial Sequence
  Synthetic oligonucleotide
tacgcgggtggtcgaccccactagtagtcatccata

SEQ ID NO: 3011 - DNA, 36 bp, Artificial Sequence; identical to SEQ ID NO: 2985
  Synthetic oligonucleotide

SEQ ID NO: 3012 - DNA, 37 bp, Artificial Sequence; identical to SEQ ID NO: 2986
  Synthetic oligonucleotide

SEQ ID NO: 3013 - DNA, 36 bp, Artificial Sequence; identical to SEQ ID NO: 2987
  Synthetic oligonucleotide

SEQ ID NO: 3014 - DNA, 37 bp, Artificial Sequence; identical to SEQ ID NO: 2988
  Synthetic oligonucleotide

SEQ ID NO: 3015 - DNA, 37 bp, Artificial Sequence; identical to SEQ ID NO: 2989
  Synthetic oligonucleotide

SEQ ID NO: 3016 - DNA, 38 bp, Artificial Sequence
  Synthetic oligonucleotide
tccgaacgggacgtacaccaagccgagctctatcctga

SEQ ID NO: 3017 - DNA, 37 bp, Artificial Sequence; identical to SEQ ID NO: 2990
  Synthetic oligonucleotide

SEQ ID NO: 3018 - DNA, 36 bp, Artificial Sequence
  Synthetic oligonucleotide
accatcgggtcacgtaaaagcggttctaatttctaa

SEQ ID NO: 3019 - DNA, 35 bp, Artificial Sequence; identical to SEQ ID NO: 721
  Synthetic oligonucleotide

SEQ ID NO: 3020 - DNA, 36 bp, Artificial Sequence
  Synthetic oligonucleotide
gaacaggcgttccctactgatttatctgtccccata

SEQ ID NO: 3021 - DNA, 36 bp, Artificial Sequence
  Synthetic oligonucleotide
gaccatgcgagcggcaaagcacggaaaatgtttgaa

SEQ ID NO: 3022 - DNA, 38 bp, Artificial Sequence
  Synthetic oligonucleotide
gagtcatgtccgcctttaacccgacttaagaactttga

SEQ ID NO: 3023 - DNA, 38 bp, Artificial Sequence
  Synthetic oligonucleotide
gcaagatgaagttggtactttcctctctattcttttga

SEQ ID NO: 3024 - DNA, 37 bp, Artificial Sequence
  Synthetic oligonucleotide
gccacaccgcccgtacatacttcctcaccaacattga

SEQ ID NO: 3025 - DNA, 35 bp, Artificial Sequence
  Synthetic oligonucleotide
gcgcgcccaccagtatcttttggtctagataggca

SEQ ID NO: 3026 - DNA, 35 bp, Artificial Sequence
  Synthetic oligonucleotide
gggcccacgccaccgtttgtccacaggaaggatac

SEQ ID NO: 3027 - DNA, 37 bp, Artificial Sequence
  Synthetic oligonucleotide
gtgcggtcatggaattcttttaagcatgataatacga

SEQ ID NO: 3028 - DNA, 35 bp, Artificial Sequence
  Synthetic oligonucleotide
ttgcaaagcgcaccgtccgagccggtggcaccgaa

SEQ ID NO: 3029 - DNA, 37 bp, Artificial Sequence
  Synthetic oligonucleotide
ttcacgccacattcacgggaactgagagtgacgacga

SEQ ID NO: 3030 - DNA, 37 bp, Artificial Sequence
  Synthetic oligonucleotide
tttgcggtcattaacttgcgtgtaggacaccggtgga

SEQ ID NO: 3031 - DNA, 35 bp, Artificial Sequence
  Synthetic oligonucleotide
acgcagtgccgccgaatcctgatcccctaactttc

SEQ ID NO: 3032 - DNA, 35 bp, Artificial Sequence
  Synthetic oligonucleotide
aatgcgtccgacctaactgttgcgattcttctttt

SEQ ID NO: 3033 - DNA, 38 bp, Artificial Sequence
  Synthetic oligonucleotide
acacacaagtccatgcgggcctcacttttcgcctatga

SEQ ID NO: 3034 - DNA, 36 bp, Artificial Sequence
  Synthetic oligonucleotide
agtcccaactgcagggtttatacctctggttctctc

SEQ ID NO: 3035 - DNA, 36 bp, Artificial Sequence
  Synthetic oligonucleotide
gcacacgcccacattgtcctactagctattttatta

SEQ ID NO: 3036 - DNA, 38 bp, Artificial Sequence
  Synthetic oligonucleotide
gccgcccctgagtagttttcgtttttcttgtcctctga

SEQ ID NO: 3037 - DNA, 35 bp, Artificial Sequence
  Synthetic oligonucleotide
gcgatcgatatgttgcctatcctcttacgacatct

SEQ ID NO: 3038 - DNA, 35 bp, Artificial Sequence
  Synthetic oligonucleotide
gcgttgtccgtgtccatccatcttgtcatttgttt

SEQ ID NO: 3039 - DNA, 35 bp, Artificial Sequence
  Synthetic oligonucleotide
taacgtacaaccgggcgcacaggccattcttctac

SEQ ID NO: 3040 - DNA, 35 bp, Artificial Sequence
  Synthetic oligonucleotide
gttcggggtgcatgtcgtgaagccgctaacctctt

SEQ ID NO: 3041 - DNA, 38 bp, Artificial Sequence
  Synthetic oligonucleotide
tgctcagtcaagcgagtaccactacgcctattccgtga

SEQ ID NO: 3042 - DNA, 38 bp, Artificial Sequence
  Synthetic oligonucleotide
tgctaaacgtactggggcttcctcagatctttgcttga

SEQ ID NO: 3043 - DNA, 36 bp, Artificial Sequence
  Synthetic oligonucleotide
tgtacccccgccgtaatcatctatcttgtccccgaa

SEQ ID NO: 3044 - DNA, 35 bp, Artificial Sequence
  Synthetic oligonucleotide
accactgaactcatggtactaatcacacaccaatt

SEQ ID NO: 3045 - DNA, 37 bp, Artificial Sequence
  Synthetic oligonucleotide
actgtacagtagtccacgaacatatcgctttctatga

SEQ ID NO: 3046 - DNA, 38 bp, Artificial Sequence
  Synthetic oligonucleotide
accgcgcgctgcagtatatcccacttcgttctatatga

SEQ ID NO: 3047 - DNA, 35 bp, Artificial Sequence
  Synthetic oligonucleotide
agtggatcactgggcggagtgcgttaggaagacgg

SEQ ID NO: 3048 - DNA, 35 bp, Artificial Sequence
  Synthetic oligonucleotide
gattacgccttaagtggtactcagttatgaggaga

SEQ ID NO: 3049 - DNA, 37 bp, Artificial Sequence
  Synthetic oligonucleotide
gcgtaggtcatgcgacgtataaccttcccacaaatga

SEQ ID NO: 3050 - DNA, 37 bp, Artificial Sequence
  Synthetic oligonucleotide
tacaccaaaaagatcggtgattaccatgcaacaagga

SEQ ID NO: 3051 - DNA, 35 bp, Artificial Sequence
  Synthetic oligonucleotide
taccagacgtaccgcacacctttcatctgcctaac

SEQ ID NO: 3052 - DNA, 35 bp, Artificial Sequence
  Synthetic oligonucleotide
tttgagactgcgggctgtgcgttgctttgatatcc

SEQ ID NO: 3053 - DNA, 35 bp, Artificial Sequence
  Synthetic oligonucleotide
actgactgcatacatccgcatattaaacccgtatt

SEQ ID NO: 3054 - DNA, 36 bp, Artificial Sequence
  Synthetic oligonucleotide
acatctccaggattccccttcagccatggccctaca

SEQ ID NO: 3055 - DNA, 38 bp, Artificial Sequence
  Synthetic oligonucleotide
acgctcagctggcatgtaccccccctctctacacttga

SEQ ID NO: 3056 - DNA, 36 bp, Artificial Sequence
  Synthetic oligonucleotide
actcgcgtgtccaacacggactgcagtagcaatcca

SEQ ID NO: 3057 - DNA, 37 bp, Artificial Sequence
  Synthetic oligonucleotide
gcaggtggtgcaggttattcatgcgaaagggtactga

SEQ ID NO: 3058 - DNA, 36 bp, Artificial Sequence
  Synthetic oligonucleotide
gcggtggaaacgtaatcggacactgcgcatgcgaca

SEQ ID NO: 3059 - DNA, 36 bp, Artificial Sequence
  Synthetic oligonucleotide
tgaacctgcgatggtccgtgcgaacccgatctcaca

SEQ ID NO: 3060 - DNA, 35 bp, Artificial Sequence
  Synthetic oligonucleotide
tcacgtccccaacaacccggagtaattccctgcca

SEQ ID NO: 3061 - DNA, 35 bp, Artificial Sequence
  Synthetic oligonucleotide
tgggtacacatccggcatgccaataacgcttaagt

SEQ ID NO: 3062 - DNA, 35 bp, Artificial Sequence
  Synthetic oligonucleotide
acgcctgtacgatgtcctcggtctcattttatttc

SEQ ID NO: 3063 - DNA, 35 bp, Artificial Sequence
  Synthetic oligonucleotide
aaacgtcaagggaaagcgtagtctcctcgaccctt

SEQ ID NO: 3064 - DNA, 36 bp, Artificial Sequence
  Synthetic oligonucleotide
actgggaagtacgctgtcaggcatttgctaactaaa

SEQ ID NO: 3065 - DNA, 35 bp, Artificial Sequence
  Synthetic oligonucleotide
aatcattgcaggtatatgcgagcgaactacgattc

SEQ ID NO: 3066 - DNA, 35 bp, Artificial Sequence
  Synthetic oligonucleotide
atacgttccggccaactgaaacggagttcgggtct

SEQ ID NO: 3067 - DNA, 36 bp, Artificial Sequence
  Synthetic oligonucleotide
atgcatagctgcccttcttatccgtttccaactaca

SEQ ID NO: 3068 - DNA, 38 bp, Artificial Sequence
  Synthetic oligonucleotide
atgcgaaactgtaagcacccttccaccttgtaccatga

SEQ ID NO: 3069 - DNA, 38 bp, Artificial Sequence
  Synthetic oligonucleotide
gacgccgaaacactaagcttttaacacttacgatatga

SEQ ID NO: 3070 - DNA, 35 bp, Artificial Sequence
  Synthetic oligonucleotide
attatcccagcgatcccgagtcccggcatttactg

SEQ ID NO: 3071 - DNA, 36 bp, Artificial Sequence
  Synthetic oligonucleotide
catgcgcatatcgctccgttcgttcctcaatttcca

SEQ ID NO: 3072 - DNA, 38 bp, Artificial Sequence
  Synthetic oligonucleotide
gcccgaacccgaaaaccgatcgcctgaatcccaattga

SEQ ID NO: 3073 - DNA, 35 bp, Artificial Sequence
  Synthetic oligonucleotide
gcaggctcgcgtagcttcaaactagcagaccacgt

SEQ ID NO: 3074 - DNA, 38 bp, Artificial Sequence
  Synthetic oligonucleotide
gcacgggacgcaagctagactacacaccgactttttga

SEQ ID NO: 3075 - DNA, 38 bp, Artificial Sequence
  Synthetic oligonucleotide
gctggcactgcgaatatcgatctacactatcccactga

SEQ ID NO: 3076 - DNA, 36 bp, Artificial Sequence
  Synthetic oligonucleotide
gctagcacacaggatccctctttattagcacttcaa

SEQ ID NO: 3077 - DNA, 35 bp, Artificial Sequence
  Synthetic oligonucleotide
tatgcgacccgttaaacccgtactcttcctaaact

SEQ ID NO: 3078 - DNA, 38 bp, Artificial Sequence
  Synthetic oligonucleotide
tagtcatgcgcgcatctcaaaatttacttctcaaatga

SEQ ID NO: 3079 - DNA, 38 bp, Artificial Sequence
  Synthetic oligonucleotide
tctacactccgctccttgacctaatttaaagaccttga

SEQ ID NO: 3080 - DNA, 35 bp, Artificial Sequence
  Synthetic oligonucleotide
tcgcggaaacctgcccctgcatcgtagccatccac

SEQ ID NO: 3081 - DNA, 36 bp, Artificial Sequence
  Synthetic oligonucleotide
ttcaccaccacccctttggacccttttaccgagaga

SEQ ID NO: 3082 - DNA, 36 bp, Artificial Sequence
  Synthetic oligonucleotide
ttgcagacctcatttacgcacttgggacttctgcca

SEQ ID NO: 3083 - DNA, 37 bp, Artificial Sequence
  Synthetic oligonucleotide
ttggcacctccactgcttgttctcgattcatgtgcga

SEQ ID NO: 3084 - DNA, 35 bp, Artificial Sequence
  Synthetic oligonucleotide
actgcggtcatcgagttactggctattgcctgacc

SEQ ID NO: 3085 - DNA, 36 bp, Artificial Sequence
  Synthetic oligonucleotide
cccgcggtaatagtgcgggcggacgcggtcatgaca

SEQ ID NO: 3086 - DNA, 36 bp, Artificial Sequence
  Synthetic oligonucleotide
gaacgtagactgactacggtccacacgcccattgta

SEQ ID NO: 3087 - DNA, 35 bp, Artificial Sequence
  Synthetic oligonucleotide
ccaacgacagatatggacgtgctgcgggggcaatc

SEQ ID NO: 3088 - DNA, 35 bp, Artificial Sequence
  Synthetic oligonucleotide
atgcgatgtcacgtgacgtgagtaaccgcccaccc

SEQ ID NO: 3089 - DNA, 35 bp, Artificial Sequence
  Synthetic oligonucleotide
gcccacccttgccagcatgtatgcttgcatgtaac

SEQ ID NO: 3090 - DNA, 35 bp, Artificial Sequence
  Synthetic oligonucleotide
gccggtcatgcggtttgcacaccactccattctac

SEQ ID NO: 3091 - DNA, 36 bp, Artificial Sequence
  Synthetic oligonucleotide
gccaggcccattccttgcgggaggttaacaccagca

SEQ ID NO: 3092 - DNA, 36 bp, Artificial Sequence; identical to SEQ ID NO: 3058
  Synthetic oligonucleotide

SEQ ID NO: 3093 - DNA, 37 bp, Artificial Sequence
  Synthetic oligonucleotide
gtttcaccccggctgggctagttctgttaatgcgaga

SEQ ID NO: 3094 - DNA, 36 bp, Artificial Sequence
  Synthetic oligonucleotide
tgtaccgcggttgcgactatttccttactgcccata

SEQ ID NO: 3095 - DNA, 35 bp, Artificial Sequence
  Synthetic oligonucleotide
ttcgcgacgataactagttgcatgtctgaattcac

SEQ ID NO: 3096 - DNA, 37 bp, Artificial Sequence
  Synthetic oligonucleotide
tgtcactgcacgatgagactttcggcgaatatactga

SEQ ID NO: 3097 - DNA, 36 bp, Artificial Sequence
  Synthetic oligonucleotide
aatgcattgcgttatttcaattgaggcgtcctaaaa

SEQ ID NO: 3098 - DNA, 38 bp, Artificial Sequence
  Synthetic oligonucleotide
gcactgccaactttcttctggggactatttagctttga

SEQ ID NO: 3099 - DNA, 36 bp, Artificial Sequence
  Synthetic oligonucleotide
ggtaccaaaagtactgccatgagagccacttcccaa

SEQ ID NO: 3100 - DNA, 35 bp, Artificial Sequence
  Synthetic oligonucleotide
catacgcacggtcctctactataattgtccaccaa

SEQ ID NO: 3101 - DNA, 35 bp, Artificial Sequence
  Synthetic oligonucleotide
atgctgcggtaatggagccggttcttaaactgcct

SEQ ID NO: 3102 - DNA, 36 bp, Artificial Sequence
  Synthetic oligonucleotide
agttactgacaggcgcgtctttcgcaacactttata

SEQ ID NO: 3103 - DNA, 35 bp, Artificial Sequence
  Synthetic oligonucleotide
gcacccgagcctaatagtcctctattccccttcca

SEQ ID NO: 3104 - DNA, 36 bp, Artificial Sequence
  Synthetic oligonucleotide
gcgagcagtccatggcccatcctcgacttaacctca

SEQ ID NO: 3105 - DNA, 36 bp, Artificial Sequence
  Synthetic oligonucleotide
ggtagcaggcataccctacggaacagttctgtggca

SEQ ID NO: 3106 - DNA, 36 bp, Artificial Sequence
  Synthetic oligonucleotide
taggcacgtgcatcaggcgttctttgcccctgttta

SEQ ID NO: 3107 - DNA, 35 bp, Artificial Sequence
  Synthetic oligonucleotide
tgtgcagtcagtgaacggtgacctagttatgattt

SEQ ID NO: 3108 - DNA, 38 bp, Artificial Sequence
  Synthetic oligonucleotide
agcccgttgctacgttgcagtaggtgtaacttcactga

SEQ ID NO: 3109 - DNA, 38 bp, Artificial Sequence
  Synthetic oligonucleotide
actaactgcaagcgcccttggcccgatttgacctttga

SEQ ID NO: 3110 - DNA, 35 bp, Artificial Sequence
  Synthetic oligonucleotide
actaccgcaaactgcactgtttaaaactccttgaa

SEQ ID NO: 3111 - DNA, 35 bp, Artificial Sequence
  Synthetic oligonucleotide
acgactatcgtacatgtgcgtagtttagattccaa

SEQ ID NO: 3112 - DNA, 37 bp, Artificial Sequence
  Synthetic oligonucleotide
agttgaccacggagtgtactgcaatggagtgtaccga

SEQ ID NO: 3113 - DNA, 36 bp, Artificial Sequence
  Synthetic oligonucleotide
gaacgagcccggatgttaggatcctcgatttgcgta

SEQ ID NO: 3114 - DNA, 35 bp, Artificial Sequence
  Synthetic oligonucleotide
agtgctgccactaagctagaaaagttttcatgccc

SEQ ID NO: 3115 - DNA, 36 bp, Artificial Sequence
  Synthetic oligonucleotide
atcgtaacggactgctatttgtacggatccctataa

SEQ ID NO: 3116 - DNA, 38 bp, Artificial Sequence
  Synthetic oligonucleotide
gcagtctagcgcccgcttgtaccacatcctcgctttga

SEQ ID NO: 3117 - DNA, 35 bp, Artificial Sequence
  Synthetic oligonucleotide
tgtactgagtgcacaacacgtgatgatgatatctt

SEQ ID NO: 3118 - DNA, 36 bp, Artificial Sequence
  Synthetic oligonucleotide
agcggtcaccgcctatggttattcatttttctctta

SEQ ID NO: 3119 - DNA, 35 bp, Artificial Sequence
  Synthetic oligonucleotide
actcagcgatgccctaacttggacgttcggctact

SEQ ID NO: 3120 - DNA, 35 bp, Artificial Sequence
  Synthetic oligonucleotide
cacaccgacgaaactgtcctcgcctactacctatc

SEQ ID NO: 3121 - DNA, 35 bp, Artificial Sequence
  Synthetic oligonucleotide
agtgaggcgtcacggctattactccgtgctaattt

SEQ ID NO: 3122 - DNA, 35 bp, Artificial Sequence; identical to SEQ ID NO: 3100
  Synthetic oligonucleotide

SEQ ID NO: 3123 - DNA, 35 bp, Artificial Sequence
  Synthetic oligonucleotide
gaaacggccatgaaccttttaatctttccaccttt

SEQ ID NO: 3124 - DNA, 36 bp, Artificial Sequence
  Synthetic oligonucleotide
gcgagaggatcaccgtgaggcttcccaactatttta

SEQ ID NO: 3125 - DNA, 35 bp, Artificial Sequence
  Synthetic oligonucleotide
gcgaggcgccctccaacccaacccattcaatggta

SEQ ID NO: 3126 - DNA, 35 bp, Artificial Sequence
  Synthetic oligonucleotide
gcgcagtccgtccacatttggtctactgctttcct

SEQ ID NO: 3127 - DNA, 35 bp, Artificial Sequence
  Synthetic oligonucleotide
gtgcgcctacatatatctcggttacaacctttttc

SEQ ID NO: 3128 - DNA, 35 bp, Artificial Sequence
  Synthetic oligonucleotide
tgcatcccaccactatgatatacctaatgccctct

SEQ ID NO: 3129 - DNA, 36 bp, Artificial Sequence
  Synthetic oligonucleotide
tgcaggccgcatcacctcttgtgccggttcatcaaa

SEQ ID NO: 3130 - DNA, 38 bp, Artificial Sequence
  Synthetic oligonucleotide
tgcgaggctagcttgttgccactatttggtccttatga

SEQ ID NO: 3131 - DNA, 38 bp, Artificial Sequence; identical to SEQ ID NO: 3108
  Synthetic oligonucleotide

SEQ ID NO: 3132 - DNA, 35 bp, Artificial Sequence
  Synthetic oligonucleotide
agggcaacgaacgcaggaatccctcattcctacgg

SEQ ID NO: 3133 - DNA, 35 bp, Artificial Sequence; identical to SEQ ID NO: 3114
  Synthetic oligonucleotide

SEQ ID NO: 3134 - DNA, 35 bp, Artificial Sequence
  Synthetic oligonucleotide
atcctcgttacgtgcacggacttctcatgcgaact

SEQ ID NO: 3135 - DNA, 36 bp, Artificial Sequence
  Synthetic oligonucleotide
gcccaggtttgacgactgccgtgcgctcggtcttaa

SEQ ID NO: 3136 - DNA, 37 bp, Artificial Sequence
  Synthetic oligonucleotide
ggtcatggcgcaacttcatcttttcacacctgattga

SEQ ID NO: 3137 - DNA, 36 bp, Artificial Sequence; identical to SEQ ID NO: 3105
  Synthetic oligonucleotide

SEQ ID NO: 3138 - DNA, 35 bp, Artificial Sequence
  Synthetic oligonucleotide
tcccgcaattacgcagaccgactacgattccaaaa

SEQ ID NO: 3139 - DNA, 38 bp, Artificial Sequence
  Synthetic oligonucleotide
tgtacgtaggtaagcgatacacactgcacccctactga

SEQ ID NO: 3140 - DNA, 35 bp, Artificial Sequence
  Synthetic oligonucleotide
tgacctctgcagtggccagcccattctttagcttc

SEQ ID NO: 3141 - DNA, 35 bp, Artificial Sequence
  Synthetic oligonucleotide
ttactgcaggtgcgatcgcgttctccaacatctct

SEQ ID NO: 3142 - DNA, 37 bp, Artificial Sequence
  Synthetic oligonucleotide
accacgttggttattgccctgctttgaagtcttacga

SEQ ID NO: 3143 - DNA, 36 bp, Artificial Sequence
  Synthetic oligonucleotide
aacacactgcgcctttactttaattttcgattatta

SEQ ID NO: 3144 - DNA, 35 bp, Artificial Sequence
  Synthetic oligonucleotide
agcaccgacgtgataggactgtaatgccctcctct

SEQ ID NO: 3145 - DNA, 35 bp, Artificial Sequence
  Synthetic oligonucleotide
atgcgcgagtcataaggcgtttcttttcactggct

SEQ ID NO: 3146 - DNA, 35 bp, Artificial Sequence
  Synthetic oligonucleotide
atgcgacatgcgttacaataatccgcgcaagccgc

SEQ ID NO: 3147 - DNA, 35 bp, Artificial Sequence
  Synthetic oligonucleotide
gagtgcgcgtacaatttgtcctcttgccgcttttt

SEQ ID NO: 3148 - DNA, 35 bp, Artificial Sequence
  Synthetic oligonucleotide
taagtcatgggcctcatctatacctgatcgatctc

SEQ ID NO: 3149 - DNA, 36 bp, Artificial Sequence
  Synthetic oligonucleotide
tcaggcgggatatgcgctcagggaagcggggagcaa

SEQ ID NO: 3150 - DNA, 37 bp, Artificial Sequence
  Synthetic oligonucleotide
tgagctcgacctgccgtcgtacaatttcccttactga

SEQ ID NO: 3151 - DNA, 38 bp, Artificial Sequence
  Synthetic oligonucleotide
acttaccgcttaatacacttgccggaccttgtgcttga

SEQ ID NO: 3152 - DNA, 35 bp, Artificial Sequence
  Synthetic oligonucleotide
actatagccacctaacccagcactaaacccacgca

SEQ ID NO: 3153 - DNA, 35 bp, Artificial Sequence
  Synthetic oligonucleotide
acccccccgcttcgtgcacttcactcccgaaatcc

SEQ ID NO: 3154 - DNA, 35 bp, Artificial Sequence
  Synthetic oligonucleotide
gccgcaccataactttagcctacccagtgccctgc

SEQ ID NO: 3155 - DNA, 36 bp, Artificial Sequence
  Synthetic oligonucleotide
tgccaccaaatacccaaccctagagtagccttatta

SEQ ID NO: 3156 - DNA, 37 bp, Artificial Sequence
  Synthetic oligonucleotide
actctagccacttgatccaccacgtcggttcccacga

SEQ ID NO: 3157 - DNA, 35 bp, Artificial Sequence
  Synthetic oligonucleotide
ttagcgataaacacatcatcccggacacgccgtgt

SEQ ID NO: 3158 - DNA, 38 bp, Artificial Sequence
  Synthetic oligonucleotide
taccgtcgctcaaaaccggcctaccctaaacccactga

SEQ ID NO: 3159 - DNA, 37 bp, Artificial Sequence
  Synthetic oligonucleotide
accgccgctctactctgtcaccgaacgccctttggga

SEQ ID NO: 3160 - DNA, 38 bp, Artificial Sequence
  Synthetic oligonucleotide
agcccgacccgcttgcctaaacccacccatgacactga

SEQ ID NO: 3161 - DNA, 35 bp, Artificial Sequence
  Synthetic oligonucleotide
aggtacccaccgcaaagcaccagtaaccacaaccc

SEQ ID NO: 3162 - DNA, 37 bp, Artificial Sequence
  Synthetic oligonucleotide
gcatccgaccaatagacccacacatctgtaccaaaga

SEQ ID NO: 3163 - DNA, 35 bp, Artificial Sequence
  Synthetic oligonucleotide
tcccgccgctaccgtaagccactccgaagtactca

SEQ ID NO: 3164 - DNA, 35 bp, Artificial Sequence
  Synthetic oligonucleotide
acgccagaccacccgatatccccccaaatggtaac

SEQ ID NO: 3165 - DNA, 38 bp, Artificial Sequence
  Synthetic oligonucleotide
aaacccacttcttacccggtaatctgccgaccgcatga

SEQ ID NO: 3166 - DNA, 35 bp, Artificial Sequence
  Synthetic oligonucleotide
acgcgtgggctactaaactccatcaccccgtgccc

SEQ ID NO: 3167 - DNA, 36 bp, Artificial Sequence
  Synthetic oligonucleotide
actattccgcatcattgagcacccgaccgaccaaaa

SEQ ID NO: 3168 - DNA, 35 bp, Artificial Sequence
  Synthetic oligonucleotide
acacaaaggctataaccgccgactctccaccagcc

SEQ ID NO: 3169 - DNA, 36 bp, Artificial Sequence
  Synthetic oligonucleotide
accaacaccaaccttctacgccgtaccctctgcaaa

SEQ ID NO: 3170 - DNA, 35 bp, Artificial Sequence
  Synthetic oligonucleotide
aaaccgctatttaccccggaccacgttgacaccga

SEQ ID NO: 3171 - DNA, 37 bp, Artificial Sequence
  Synthetic oligonucleotide
tacgtccaccccgaatcctaattcatacacctaaaga

SEQ ID NO: 3172 - DNA, 36 bp, Artificial Sequence
  Synthetic oligonucleotide
aaatgccacatcacttattcaccccgcgcaccccga

SEQ ID NO: 3173 - DNA, 37 bp, Artificial Sequence
  Synthetic oligonucleotide
acaatcaccttacaccttacgacctgcttaatagaga

SEQ ID NO: 3174 - DNA, 35 bp, Artificial Sequence
  Synthetic oligonucleotide
gttcgtgtacgtcgcattaaccctaccataaaacc

SEQ ID NO: 3175 - DNA, 37 bp, Artificial Sequence
  Synthetic oligonucleotide
gcgtatcaaaaaacccaccgctaactaccacaaccga

SEQ ID NO: 3176 - DNA, 38 bp, Artificial Sequence
  Synthetic oligonucleotide
gtgaacccacctgcgccctacactattaaacgagctga

SEQ ID NO: 3177 - DNA, 35 bp, Artificial Sequence
  Synthetic oligonucleotide
tcaacatgcccacatacaccagacacactatacac

SEQ ID NO: 3178 - DNA, 35 bp, Artificial Sequence
  Synthetic oligonucleotide
catgcaacccgcacttaggcgcgagccaattacca

SEQ ID NO: 3179 - DNA, 37 bp, Artificial Sequence
  Synthetic oligonucleotide
acccccaatccttataccataaacacatgaccggtga

SEQ ID NO: 3180 - DNA, 37 bp, Artificial Sequence
  Synthetic oligonucleotide
accggtcaaccccccacagaacatttcccgtcaccga

SEQ ID NO: 3181 - DNA, 37 bp, Artificial Sequence
  Synthetic oligonucleotide
acatgaatccaactaaaacccgctccgtgccgaacga

SEQ ID NO: 3182 - DNA, 35 bp, Artificial Sequence
  Synthetic oligonucleotide
atcccccaaacacaaacgcgagtttcccgggtcca

SEQ ID NO: 3183 - DNA, 38 bp, Artificial Sequence
  Synthetic oligonucleotide
ctctgcgcgagtcaccctcacctagatccctgatatga

SEQ ID NO: 3184 - DNA, 35 bp, Artificial Sequence
  Synthetic oligonucleotide
ctacccaacggtcacacccaccgcgtatccactac

SEQ ID NO: 3185 - DNA, 35 bp, Artificial Sequence
  Synthetic oligonucleotide
ttacacccgtcaactaaccatacccacgagagagc

SEQ ID NO: 3186 - DNA, 34 bp, Artificial Sequence
  Synthetic oligonucleotide
accccactactaccctctcgtccgcctaactgtc

SEQ ID NO: 3187 - DNA, 36 bp, Artificial Sequence
  Synthetic oligonucleotide
accagtccatatcccgccattgtgtcgttcgatcga

SEQ ID NO: 3188 - DNA, 37 bp, Artificial Sequence
  Synthetic oligonucleotide
gccaccccctaccctaacgacccaatatgactggtga

SEQ ID NO: 3189 - DNA, 38 bp, Artificial Sequence
  Synthetic oligonucleotide
caccaaatatcaagtgcctctctaaccttctgacctga

SEQ ID NO: 3190 - DNA, 36 bp, Artificial Sequence
  Synthetic oligonucleotide
actgtcactaccccacgcgcaaccaacaaataccca

SEQ ID NO: 3191 - DNA, 37 bp, Artificial Sequence
  Synthetic oligonucleotide
agctcgactaaaccacccgtataaaagctatacccga

SEQ ID NO: 3192 - DNA, 35 bp, Artificial Sequence
  Synthetic oligonucleotide
gagcgccctacttcaactcccaaaccacatgaccg

SEQ ID NO: 3193 - DNA, 35 bp, Artificial Sequence
  Synthetic oligonucleotide
aacaaagttcacccatcccacaaccccaattcgac

SEQ ID NO: 3194 - DNA, 37 bp, Artificial Sequence
  Synthetic oligonucleotide
cttctgacccgtagaccacaacttcccgacttcccga

SEQ ID NO: 3195 - DNA, 35 bp, Artificial Sequence
  Synthetic oligonucleotide
accccataccattaactccggattccccagtgctc

SEQ ID NO: 3196 - DNA, 38 bp, Artificial Sequence
  Synthetic oligonucleotide
agccacccacaaaacgcgcaatcagtaaacccacctga

SEQ ID NO: 3197 - DNA, 35 bp, Artificial Sequence
  Synthetic oligonucleotide
tcctaacgctgtcgacgccaccacccggacccact

SEQ ID NO: 3198 - DNA, 36 bp, Artificial Sequence
  Synthetic oligonucleotide
ccaatacccccgcgcccaatcccacacgttatcgta

SEQ ID NO: 3199 - DNA, 36 bp, Artificial Sequence
  Synthetic oligonucleotide
agcttacccactcccgaaagacaccctgacaccgta

SEQ ID NO: 3200 - DNA, 36 bp, Artificial Sequence
  Synthetic oligonucleotide
atgacctaatccaccacccctgcacctcagtctaca

SEQ ID NO: 3201 - DNA, 35 bp, Artificial Sequence
  Synthetic oligonucleotide
atcccgcacacctaaagcaaacgtggcttaggtcc

SEQ ID NO: 3202 - DNA, 37 bp, Artificial Sequence
  Synthetic oligonucleotide
atcctccgcccgggcactaaccagctcctgaccacga

SEQ ID NO: 3203 - DNA, 35 bp, Artificial Sequence
  Synthetic oligonucleotide
actgcgcccatcagataccaaaacctgcaaaccgc

SEQ ID NO: 3204 - DNA, 36 bp, Artificial Sequence
  Synthetic oligonucleotide
gccacccgcctttagccctacagatacacacactaa

SEQ ID NO: 3205 - DNA, 36 bp, Artificial Sequence
  Synthetic oligonucleotide
accccctacgccggctgactaaaccgcacaccctca

SEQ ID NO: 3206 - DNA, 36 bp, Artificial Sequence
  Synthetic oligonucleotide
gtttaccgtacccccttgcactgcccgaccaaccca

SEQ ID NO: 3207 - DNA, 35 bp, Artificial Sequence
  Synthetic oligonucleotide
actggaaccccaatcggagcgaagcctgactaccg

SEQ ID NO: 3208 - DNA, 37 bp, Artificial Sequence
  Synthetic oligonucleotide
tgccaacctaccataccatcaattgacagatacctga

SEQ ID NO: 3209 - DNA, 37 bp, Artificial Sequence
  Synthetic oligonucleotide
tcacccacgccatatactgcactccaaaccccgctga

SEQ ID NO: 3210 - DNA, 36 bp, Artificial Sequence
  Synthetic oligonucleotide
aaactgttcctgtgacaaaaccctcaacccatacca

SEQ ID NO: 3211 - DNA, 37 bp, Artificial Sequence
  Synthetic oligonucleotide
acgccacctacccacctcactatgaaatatactcgga

SEQ ID NO: 3212 - DNA, 35 bp, Artificial Sequence
  Synthetic oligonucleotide
gtccccttaagtccacccatacacgttactgaccc

SEQ ID NO: 3213 - DNA, 37 bp, Artificial Sequence
  Synthetic oligonucleotide
gagaacccaccagcaccaattcacaaacacttacgga

SEQ ID NO: 3214 - DNA, 36 bp, Artificial Sequence
  Synthetic oligonucleotide
acaagcctaacccgacccctagttctcacgttgaca

SEQ ID NO: 3215 - DNA, 38 bp, Artificial Sequence
  Synthetic oligonucleotide
acaccctccaaagcacaaacctacccattagccaatga

SEQ ID NO: 3216 - DNA, 36 bp, Artificial Sequence
  Synthetic oligonucleotide
aagtaccccaactcactgtaggtcactacgacaaca

SEQ ID NO: 3217 - DNA, 35 bp, Artificial Sequence
  Synthetic oligonucleotide
acgccgacccgatattttagcaaatatcacctacc

SEQ ID NO: 3218 - DNA, 38 bp, Artificial Sequence
  Synthetic oligonucleotide
acgttaacacccgcctcccacacccacttgacaggtga

SEQ ID NO: 3219 - DNA, 35 bp, Artificial Sequence
  Synthetic oligonucleotide
catcaagcagtcaacctgactcatcccatgtaccc

SEQ ID NO: 3220 - DNA, 37 bp, Artificial Sequence
  Synthetic oligonucleotide
acgcagttccaccacccattgtcaccaagatcatcga

SEQ ID NO: 3221 - DNA, 37 bp, Artificial Sequence
  Synthetic oligonucleotide
ctatgcaacacccgccttcgcacgttcacactaccga

SEQ ID NO: 3222 - DNA, 35 bp, Artificial Sequence
  Synthetic oligonucleotide
agcatgacacggcacctaccacccgaacgaccatc

SEQ ID NO: 3223 - DNA, 37 bp, Artificial Sequence
  Synthetic oligonucleotide
ttaataccgatttacacgctacccgtcccgggaggga

SEQ ID NO: 3224 - DNA, 37 bp, Artificial Sequence
  Synthetic oligonucleotide
aatacgctccagctcacctaaccctactaatcctcga

SEQ ID NO: 3225 - DNA, 35 bp, Artificial Sequence
  Synthetic oligonucleotide
acggaacaatcccccactatgctccacttcttact

SEQ ID NO: 3226 - DNA, 35 bp, Artificial Sequence
  Synthetic oligonucleotide
gcacacaaacattccaccaggtgacaaccccgaca

SEQ ID NO: 3227 - DNA, 37 bp, Artificial Sequence
  Synthetic oligonucleotide
atccgctctcacgacgccgaccaaacacattccggga

SEQ ID NO: 3228 - DNA, 35 bp, Artificial Sequence
  Synthetic oligonucleotide
tctgcacgcgaagctccgccgaccacaatacaaac

SEQ ID NO: 3229 - DNA, 36 bp, Artificial Sequence
  Synthetic oligonucleotide
tgaaatcgaccacttgagagcgtacttaagcacccg

SEQ ID NO: 3230 - DNA, 34 bp, Artificial Sequence
  Synthetic oligonucleotide
aaccgaatcccaggacctaactcatcccatgaaa

SEQ ID NO: 3231 - DNA, 35 bp, Artificial Sequence
  Synthetic oligonucleotide
atcctcctctgacctcgatctcccttaccaaacgg

SEQ ID NO: 3232 - DNA, 38 bp, Artificial Sequence
  Synthetic oligonucleotide
tggtccaacccccacgccgccatcactggacaacttga

SEQ ID NO: 3233 - DNA, 36 bp, Artificial Sequence
  Synthetic oligonucleotide
gcaccgcgcctctaccctacttacctaccccatcaa

SEQ ID NO: 3234 - DNA, 36 bp, Artificial Sequence
  Synthetic oligonucleotide
ggggcgcacgaaatcagaacaaccctaaaaccccta

SEQ ID NO: 3235 - DNA, 38 bp, Artificial Sequence
  Synthetic oligonucleotide
gactacccgctcactcacccgtcccaaattagatatga

SEQ ID NO: 3236 - DNA, 35 bp, Artificial Sequence
  Synthetic oligonucleotide
tacgccatcaaacccgatacctaaatttagcacac

SEQ ID NO: 3237 - DNA, 36 bp, Artificial Sequence
  Synthetic oligonucleotide
ttgcagaacacgaccaccaccgctttagagccacca

SEQ ID NO: 3238 - DNA, 35 bp, Artificial Sequence
  Synthetic oligonucleotide
taactcggtcctgatgctctacccgtatcaaccct

SEQ ID NO: 3239 - DNA, 35 bp, Artificial Sequence
  Synthetic oligonucleotide
ccgcatcccacagaactcggctactcaaaccacta

SEQ ID NO: 3240 - DNA, 35 bp, Artificial Sequence
  Synthetic oligonucleotide
gcagcactccacatcatcaaccatccacaaacctc

SEQ ID NO: 3241 - DNA, 35 bp, Artificial Sequence
  Synthetic oligonucleotide
actacatagaaggacccaaacatccctaccgcgct

SEQ ID NO: 3242 - DNA, 35 bp, Artificial Sequence
  Synthetic oligonucleotide
aacggcctaacacttagaaacctgactagccctac

SEQ ID NO: 3243 - DNA, 35 bp, Artificial Sequence
  Synthetic oligonucleotide
gccccgccgggctatccgcgacctagcctccctct

SEQ ID NO: 3244 - DNA, 36 bp, Artificial Sequence
  Synthetic oligonucleotide
gagtaatgctacccacaacccgcctaaaccatatca

SEQ ID NO: 3245 - DNA, 37 bp, Artificial Sequence
  Synthetic oligonucleotide
ctcactagactcccaactaaccttcttgctccctaga

SEQ ID NO: 3246 - DNA, 38 bp, Artificial Sequence
  Synthetic oligonucleotide
gaaactcaaacacactaagatcctaatcatatccatga

SEQ ID NO: 3247 - DNA, 38 bp, Artificial Sequence
  Synthetic oligonucleotide
gtcgtagcacgctccttacacgctttaatcctagatga

SEQ ID NO: 3248 - DNA, 35 bp, Artificial Sequence
  Synthetic oligonucleotide
aacgaaacggtctgctaccaccatccccacacacc

SEQ ID NO: 3249 - DNA, 35 bp, Artificial Sequence
  Synthetic oligonucleotide
ccccagagaacccgcacctagtcacacgaccactt

SEQ ID NO: 3250 - DNA, 35 bp, Artificial Sequence
  Synthetic oligonucleotide
ccgagtaccgtcattaatcaactagccgacaccac

SEQ ID NO: 3251 - DNA, 37 bp, Artificial Sequence
  Synthetic oligonucleotide
actgcccgattgtcgctggaattccgctatctccgga

SEQ ID NO: 3252 - DNA, 36 bp, Artificial Sequence
  Synthetic oligonucleotide
tgcgtccccacgaaaccatagccaacccaccggaca

SEQ ID NO: 3253 - DNA, 36 bp, Artificial Sequence
  Synthetic oligonucleotide
accgcaggtcatttcccagtactaccgacagacgca

SEQ ID NO: 3254 - DNA, 35 bp, Artificial Sequence
  Synthetic oligonucleotide
gcccttatgcaaaacccgcggaccggagaccatac

SEQ ID NO: 3255 - DNA, 38 bp, Artificial Sequence
  Synthetic oligonucleotide
acccataagcctagaaccaccctatcacacgaagttga

SEQ ID NO: 3256 - DNA, 37 bp, Artificial Sequence
  Synthetic oligonucleotide
tagtccgagcacgcctataaaatgagccctaattctg

SEQ ID NO: 3257 - DNA, 35 bp, Artificial Sequence
  Synthetic oligonucleotide
cacaccactcgtagctgtctgtcccccgctttagt

SEQ ID NO: 3258 - DNA, 37 bp, Artificial Sequence
  Synthetic oligonucleotide
cgttaccgtactaatcccacccaggcctattcgtgga

SEQ ID NO: 3259 - DNA, 36 bp, Artificial Sequence
  Synthetic oligonucleotide
gcccggggcccactagatccagactcaacaccgcca

SEQ ID NO: 3260 - DNA, 34 bp, Artificial Sequence
  Synthetic oligonucleotide
ccagcatatgccctacccgcatccgatcaactat

SEQ ID NO: 3261 - DNA, 35 bp, Artificial Sequence
  Synthetic oligonucleotide
tccatatcaaaccaccctaaccagacgaatcgggc

SEQ ID NO: 3262 - DNA, 37 bp, Artificial Sequence
  Synthetic oligonucleotide
acctttgaccgcccatgaactcaccgggggacggtga

SEQ ID NO: 3263 - DNA, 35 bp, Artificial Sequence
  Synthetic oligonucleotide
ccatcccgctccctgtaacggaatcactcccctcc

SEQ ID NO: 3264 - DNA, 35 bp, Artificial Sequence
  Synthetic oligonucleotide
cctgcacaccgatacaatgcctaaaaccgcatgtc

SEQ ID NO: 3265 - DNA, 37 bp, Artificial Sequence
  Synthetic oligonucleotide
gcctctgaatcaacccgctagcacttctagacttgga

SEQ ID NO: 3266 - DNA, 37 bp, Artificial Sequence
  Synthetic oligonucleotide
aacgtcaaaaactccgcgccattaaccccaaccggga

SEQ ID NO: 3267 - DNA, 37 bp, Artificial Sequence
  Synthetic oligonucleotide
ttatctacttagcccgcccttactacagtccgcagga

SEQ ID NO: 3268 - DNA, 37 bp, Artificial Sequence
  Synthetic oligonucleotide
ttcacgccgacccgaccctgctttaaagagttcacga

SEQ ID NO: 3269 - DNA, 35 bp, Artificial Sequence
  Synthetic oligonucleotide
agtcactcaccgcgcacgaacgaaacccgctgcac

SEQ ID NO: 3270 - DNA, 38 bp, Artificial Sequence
  Synthetic oligonucleotide
gtccgttcttgtcccgccaaaccatagtaatccgatga

SEQ ID NO: 3271 - DNA, 38 bp, Artificial Sequence
  Synthetic oligonucleotide
actctcaatcctcaggctctgcccttccaaccagatga

SEQ ID NO: 3272 - DNA, 38 bp, Artificial Sequence
  Synthetic oligonucleotide
aacccctattccgtggacactcctatcatgcacgctga

SEQ ID NO: 3273 - DNA, 35 bp, Artificial Sequence
  Synthetic oligonucleotide
accaataaccaactatataccttagatgacttgaa

SEQ ID NO: 3274 - DNA, 37 bp, Artificial Sequence
  Synthetic oligonucleotide
gaccctcagtgcctaccccagtgcaaacaattctgga

SEQ ID NO: 3275 - DNA, 38 bp, Artificial Sequence
  Synthetic oligonucleotide
acaccgtgcccaaactatacggaccacaccgactatga

SEQ ID NO: 3276 - DNA, 36 bp, Artificial Sequence
  Synthetic oligonucleotide
aacctgtcttttcgctatcccacatccgagagacca

SEQ ID NO: 3277 - DNA, 38 bp, Artificial Sequence
  Synthetic oligonucleotide
aaacccgcatctgggaaccggccccaacttggccttga

SEQ ID NO: 3278 - DNA, 37 bp, Artificial Sequence
  Synthetic oligonucleotide
tccgccagtacgcatccaatatagtccggactatgga

SEQ ID NO: 3279 - DNA, 36 bp, Artificial Sequence
  Synthetic oligonucleotide
tgacacgaacgttatgcaatcccgactctggacaaa

SEQ ID NO: 3280 - DNA, 35 bp, Artificial Sequence
  Synthetic oligonucleotide
gcctggcactatactgagtccatccgtacatcccg

SEQ ID NO: 3281 - DNA, 36 bp, Artificial Sequence
  Synthetic oligonucleotide
aatcgtacaggtgtctcccccaccaccccgcgaaaa

SEQ ID NO: 3282 - DNA, 36 bp, Artificial Sequence
  Synthetic oligonucleotide
aacccgcaccccacaactgctacctactggtgcata

SEQ ID NO: 3283 - DNA, 35 bp, Artificial Sequence
  Synthetic oligonucleotide
acaaccccgcaccgttactgccacctctactcacg

SEQ ID NO: 3284 - DNA, 38 bp, Artificial Sequence
  Synthetic oligonucleotide
gaggcattatatcatcccgcatccaatatagaccatga

SEQ ID NO: 3285 - DNA, 37 bp, Artificial Sequence
  Synthetic oligonucleotide
gtcgcgttctacgccccaaccctagctcccttccaga

SEQ ID NO: 3286 - DNA, 36 bp, Artificial Sequence
  Synthetic oligonucleotide
acccaagcaagaatccgactatagctcacctagaca

SEQ ID NO: 3287 - DNA, 37 bp, Artificial Sequence
  Synthetic oligonucleotide
tcttgcacctgcccgcctcagtagactacccgctgga

SEQ ID NO: 3288 - DNA, 38 bp, Artificial Sequence
  Synthetic oligonucleotide
aagttactcctccatctctgcacatggcactagcatga

SEQ ID NO: 3289 - DNA, 36 bp, Artificial Sequence
  Synthetic oligonucleotide
atgcaggcaattaggacatttcactctcgcccgtga

SEQ ID NO: 3290 - DNA, 38 bp, Artificial Sequence
  Synthetic oligonucleotide
acccatattgatccccaccaccaccatcaacgttctga

SEQ ID NO: 3291 - DNA, 37 bp, Artificial Sequence
  Synthetic oligonucleotide
aaagcccagtaactcccggaagattagtaccccccga

SEQ ID NO: 3292 - DNA, 37 bp, Artificial Sequence
  Synthetic oligonucleotide
acttaaggagatcctccccactacacatacccaaaga

SEQ ID NO: 3293 - DNA, 36 bp, Artificial Sequence
  Synthetic oligonucleotide
cccaaatacctattcccgccagtccacgcttatgta

SEQ ID NO: 3294 - DNA, 35 bp, Artificial Sequence
  Synthetic oligonucleotide
aggcacctattacgtccaacccatcccactcggtc

SEQ ID NO: 3295 - DNA, 36 bp, Artificial Sequence
  Synthetic oligonucleotide
acccgccacgaaagcccgactaggtaatacgccgta

SEQ ID NO: 3296 - DNA, 37 bp, Artificial Sequence
  Synthetic oligonucleotide
atcgctccgtttaaatcctaaacccacagccgcttga

SEQ ID NO: 3297 - DNA, 38 bp, Artificial Sequence
  Synthetic oligonucleotide
tgtcatcccacctaaacggggaccatgcatctaaatga

SEQ ID NO: 3298 - DNA, 36 bp, Artificial Sequence
  Synthetic oligonucleotide
gagcactgagtctgacccacaccgcacaggggacta

SEQ ID NO: 3299 - DNA, 38 bp, Artificial Sequence
  Synthetic oligonucleotide
ggtaatccgcctccacacttgcgtgtcccatcatatga

SEQ ID NO: 3300 - DNA, 38 bp, Artificial Sequence
  Synthetic oligonucleotide
tgacaatgacggacccgatactaacccgcagtacttga

SEQ ID NO: 3301 - DNA, 35 bp, Artificial Sequence
  Synthetic oligonucleotide
ggagaaacgtacttgccatccaccccggacatacc

SEQ ID NO: 3302 - DNA, 37 bp, Artificial Sequence
  Synthetic oligonucleotide
acatttgccgcctattcgggcccgcctatcctgtaga

SEQ ID NO: 3303 - DNA, 38 bp, Artificial Sequence
  Synthetic oligonucleotide
acgctcgccgccttttcctagctgtatcccaatgatga

SEQ ID NO: 3304 - DNA, 36 bp, Artificial Sequence
  Synthetic oligonucleotide
cctcgccgcttctgccctacgagtaccccaactaca

SEQ ID NO: 3305 - DNA, 37 bp, Artificial Sequence
  Synthetic oligonucleotide
acccgcccgcttacctgagatatcgagagccccatga

SEQ ID NO: 3306 - DNA, 35 bp, Artificial Sequence
  Synthetic oligonucleotide
ttcccgtccggtactgccctaatcataaagaaacg

SEQ ID NO: 3307 - DNA, 37 bp, Artificial Sequence
  Synthetic oligonucleotide
gtgggtcatcacttcccgcaaatcccgattcctacga

SEQ ID NO: 3308 - DNA, 35 bp, Artificial Sequence
  Synthetic oligonucleotide
acaccgctttgctcggcgacttatcccaaatggta

SEQ ID NO: 3309 - DNA, 37 bp, Artificial Sequence
  Synthetic oligonucleotide
gcgtatcaaaaaacccaccgctaactacaacaaccga

SEQ ID NO: 3310 - DNA, 37 bp, Artificial Sequence
  Synthetic oligonucleotide
ggcccgcctgccaccgaaaacgcgagtacttccaaga

SEQ ID NO: 3311 - DNA, 35 bp, Artificial Sequence
  Synthetic oligonucleotide
gccccagcgcccacctcattccaaatccacgcaat

SEQ ID NO: 3312 - DNA, 37 bp, Artificial Sequence
  Synthetic oligonucleotide
ctcaggctgcaactacccaggttacccatcacttcga

SEQ ID NO: 3313 - DNA, 35 bp, Artificial Sequence
  Synthetic oligonucleotide
acgccgtttctgtgctaccaaccccctgtgctact

SEQ ID NO: 3314 - DNA, 36 bp, Artificial Sequence
  Synthetic oligonucleotide
aaccaccaactctacgcgagttatcctgcccgacga

SEQ ID NO: 3315 - DNA, 36 bp, Artificial Sequence
  Synthetic oligonucleotide
ccctaccacccgaaaacttgaaatcacccgcgtata

SEQ ID NO: 3316 - DNA, 35 bp, Artificial Sequence
  Synthetic oligonucleotide
gacactgcactctgtaccccaacctatgcctctac

SEQ ID NO: 3317 - DNA, 38 bp, Artificial Sequence
  Synthetic oligonucleotide
ctactataatccgctccaccaaaaaatagcctcagtga

SEQ ID NO: 3318 - DNA, 38 bp, Artificial Sequence
  Synthetic oligonucleotide
aggtgtcaactgccactacatccacctgtttccgatga

SEQ ID NO: 3319 - DNA, 38 bp, Artificial Sequence
  Synthetic oligonucleotide
tgtagtattgccttccctcttccgctataaaatgatga

SEQ ID NO: 3320 - DNA, 37 bp, Artificial Sequence
  Synthetic oligonucleotide
gagaacgcccattcgataaccaaaccaacttataaga

SEQ ID NO: 3321 - DNA, 38 bp, Artificial Sequence
  Synthetic oligonucleotide
aggtcatttctactccgattgccagtcaccgatcgtga

SEQ ID NO: 3322 - DNA, 36 bp, Artificial Sequence
  Synthetic oligonucleotide
acttccttggcctggattctacccaataagaactca

SEQ ID NO: 3323 - DNA, 35 bp, Artificial Sequence
  Synthetic oligonucleotide
cttacaaatccttgcctacgacccgaccactggcc

SEQ ID NO: 3324 - DNA, 37 bp, Artificial Sequence
  Synthetic oligonucleotide
gtgcgcctactgctcctacctctgaccacatgtgtga

SEQ ID NO: 3325 - DNA, 35 bp, Artificial Sequence
  Synthetic oligonucleotide
cccctgcctaaaccggttagtgccttgccgctccc

SEQ ID NO: 3326 - DNA, 37 bp, Artificial Sequence
  Synthetic oligonucleotide
actgagtgcatcccacgtactttacaaatccgactga

SEQ ID NO: 3327 - DNA, 35 bp, Artificial Sequence
  Synthetic oligonucleotide
aatccgatcttaccgctatctgataccgagaatta

SEQ ID NO: 3328 - DNA, 38 bp, Artificial Sequence
  Synthetic oligonucleotide
cccaccattacgacctataccccatgttacacgtatga

SEQ ID NO: 3329 - DNA, 35 bp, Artificial Sequence
  Synthetic oligonucleotide
caccgccttagtcccgtaaatactatgctcctctg

SEQ ID NO: 3330 - DNA, 37 bp, Artificial Sequence
  Synthetic oligonucleotide
acagtatacatcacacccctcattttcggagtgccga

SEQ ID NO: 3331 - DNA, 38 bp, Artificial Sequence
  Synthetic oligonucleotide
gcccagtaccggtccaccccgcttccgtactaccctga

SEQ ID NO: 3332 - DNA, 36 bp, Artificial Sequence
  Synthetic oligonucleotide
gaacgtcaccgtatcccccgcatgatcagggcccca

SEQ ID NO: 3333 - DNA, 37 bp, Artificial Sequence
  Synthetic oligonucleotide
gcgcctacgattgacaccgccggaacatacccacaga

SEQ ID NO: 3334 - DNA, 38 bp, Artificial Sequence
  Synthetic oligonucleotide
tattgccccaagatcgacccaacctcaacgcccaatta

SEQ ID NO: 3335 - DNA, 38 bp, Artificial Sequence
  Synthetic oligonucleotide
tccactaccggcgccgacgggccgcatgtaatttctga

SEQ ID NO: 3336 - DNA, 37 bp, Artificial Sequence
  Synthetic oligonucleotide
tcaccaaacgtcatccttcacccgagactgtagggga

SEQ ID NO: 3337 - DNA, 35 bp, Artificial Sequence
  Synthetic oligonucleotide
accgcctctatcggaactttgcttagatactacgc

SEQ ID NO: 3338 - DNA, 37 bp, Artificial Sequence
  Synthetic oligonucleotide
ggacaaaaaacaccttagccccaaatcactaccacta

SEQ ID NO: 3339 - DNA, 37 bp, Artificial Sequence
  Synthetic oligonucleotide
cgcgagccacacctccgcacatttaccctcgggatga

SEQ ID NO: 3340 - DNA, 38 bp, Artificial Sequence
  Synthetic oligonucleotide
ttgtggcttcacccatcaatctcctctgggtctactga

SEQ ID NO: 3341 - DNA, 36 bp, Artificial Sequence
  Synthetic oligonucleotide
ctctgctgactatacccatcataacacgcgagccta

SEQ ID NO: 3342 - DNA, 37 bp, Artificial Sequence
  Synthetic oligonucleotide
taacagcccgacacacccgaactactatggacactga

SEQ ID NO: 3343 - DNA, 38 bp, Artificial Sequence
  Synthetic oligonucleotide
acaccgcatctgccctcggtcaccctacacatcattga

SEQ ID NO: 3344 - DNA, 35 bp, Artificial Sequence
  Synthetic oligonucleotide
actgcctacactacttcgtgcgaacgatagctctt

SEQ ID NO: 3345 - DNA, 35 bp, Artificial Sequence
  Synthetic oligonucleotide
aattccgctctcctgaacgcttggagtcccattca

SEQ ID NO: 3346 - DNA, 35 bp, Artificial Sequence
  Synthetic oligonucleotide
tgctggtcatcacaaccgacgataacgcttaatat

SEQ ID NO: 3347 - DNA, 35 bp, Artificial Sequence
  Synthetic oligonucleotide
gtgacggaacctactactgcactgaaccaccgccc

SEQ ID NO: 3348 - DNA, 35 bp, Artificial Sequence
  Synthetic oligonucleotide
gcccgcgattcacgctccacttaatccgataacct

SEQ ID NO: 3349 - DNA, 37 bp, Artificial Sequence
  Synthetic oligonucleotide
gatatgatcccacttcctagacacctatattacctga

SEQ ID NO: 3350 - DNA, 36 bp, Artificial Sequence
  Synthetic oligonucleotide
cttatctgctgtccctttcgcttggatcacgattaa

SEQ ID NO: 3351 - DNA, 37 bp, Artificial Sequence
  Synthetic oligonucleotide
aatcaactctcatgccgcccatcagtccacgttatga

SEQ ID NO: 3352 - DNA, 36 bp, Artificial Sequence
  Synthetic oligonucleotide
cgcttactcgtactcatcatcacgtgacattcacta

SEQ ID NO: 3353 - DNA, 36 bp, Artificial Sequence
  Synthetic oligonucleotide
tccctatccccccgccagtaaaacccacatgacgga

SEQ ID NO: 3354 - DNA, 36 bp, Artificial Sequence
  Synthetic oligonucleotide
actccatattcacgataacccacagatccgttaaaa

SEQ ID NO: 3355 - DNA, 37 bp, Artificial Sequence
  Synthetic oligonucleotide
tccatcccgactaatttttagacctttgctacacaga

SEQ ID NO: 3356 - DNA, 37 bp, Artificial Sequence
  Synthetic oligonucleotide
gcgttcgttctatactttctaacgttctttacacaga

SEQ ID NO: 3357 - DNA, 37 bp, Artificial Sequence
  Synthetic oligonucleotide
taccggataacaacgccaattttcattaatttcaaga

SEQ ID NO: 3358 - DNA, 37 bp, Artificial Sequence
  Synthetic oligonucleotide
ggactacacgtgagcgcttattctttgactttacaga

SEQ ID NO: 3359 - DNA, 35 bp, Artificial Sequence
  Synthetic oligonucleotide
atcacgggagtgatagtctgggccctgaaactact

SEQ ID NO: 3360 - DNA, 35 bp, Artificial Sequence
  Synthetic oligonucleotide
aaatcccatcgagcccttaacccagaccaactcaa

SEQ ID NO: 3361 - DNA, 35 bp, Artificial Sequence
  Synthetic oligonucleotide
atcatcccggcttttgagtaaaccagcttttcacc

SEQ ID NO: 3362 - DNA, 35 bp, Artificial Sequence
  Synthetic oligonucleotide
gagtacttgactctggtatattttttctccccatt

SEQ ID NO: 3363 - DNA, 35 bp, Artificial Sequence
  Synthetic oligonucleotide
actttacacccgcgaacaatattacctccccgaac

SEQ ID NO: 3364 - DNA, 37 bp, Artificial Sequence
  Synthetic oligonucleotide
aacctggccattacactttccttttgagttctctaga

SEQ ID NO: 3365 - DNA, 36 bp, Artificial Sequence
  Synthetic oligonucleotide
gagtaggcctctgcactcccttctcgagatccgtaa

SEQ ID NO: 3366 - DNA, 35 bp, Artificial Sequence
  Synthetic oligonucleotide
tcttggaggacttttttttgacggttttttgtggt

SEQ ID NO: 3367 - DNA, 37 bp, Artificial Sequence
  Synthetic oligonucleotide
acgcacatctcattccgaataccttacgaataacaga

SEQ ID NO: 3368 - DNA, 37 bp, Artificial Sequence
  Synthetic oligonucleotide
gacctatacatatccgcgcacataaactcgaactaga

SEQ ID NO: 3369 - DNA, 35 bp, Artificial Sequence
  Synthetic oligonucleotide
ggaccgtttttgttttattgatgccgattgaccgc

SEQ ID NO: 3370 - DNA, 38 bp, Artificial Sequence
  Synthetic oligonucleotide
atcttttgcctgatcgcttcgaaattcgttccgcctga

SEQ ID NO: 3371 - DNA, 37 bp, Artificial Sequence
  Synthetic oligonucleotide
ttttgcatatacccttggttcttgttccatccgagga

SEQ ID NO: 3372 - DNA, 35 bp, Artificial Sequence
  Synthetic oligonucleotide
atttttgcaacatttgaaatttgggcattgggaac

SEQ ID NO: 3373 - DNA, 36 bp, Artificial Sequence
  Synthetic oligonucleotide
gagcacttaatttgtttgtatactgatggttttggt

SEQ ID NO: 3374 - DNA, 38 bp, Artificial Sequence
  Synthetic oligonucleotide
cgtagtaccggtctacttcattgcccacttgtatttga

SEQ ID NO: 3375 - DNA, 38 bp, Artificial Sequence
  Synthetic oligonucleotide
atgtggtggcctgaattgagtcctttttgttttgctga

SEQ ID NO: 3376 - DNA, 37 bp, Artificial Sequence
  Synthetic oligonucleotide
acttaccctggtgcactgaaagtgaacatttgtttga

SEQ ID NO: 3377 - DNA, 37 bp, Artificial Sequence
  Synthetic oligonucleotide
ttgcaactataggttgcattggtttttcgatacttga

SEQ ID NO: 3378 - DNA, 35 bp, Artificial Sequence
  Synthetic oligonucleotide
gacgctactaagtgtcgtgggattttttgctctct

SEQ ID NO: 3379 - DNA, 35 bp, Artificial Sequence
  Synthetic oligonucleotide
gcctggattactttgtgagagtttttggggtttgc

SEQ ID NO: 3380 - DNA, 35 bp, Artificial Sequence
  Synthetic oligonucleotide
ggtatagcggtcttgcaaacttgcaaaatcctctt

SEQ ID NO: 3381 - DNA, 38 bp, Artificial Sequence
  Synthetic oligonucleotide
gagtagttccggtcgtttacgggcttttgtttatttga

SEQ ID NO: 3382 - DNA, 38 bp, Artificial Sequence
  Synthetic oligonucleotide
tgggactttgccgcgaagctcttttctgttatctatga

SEQ ID NO: 3383 - DNA, 35 bp, Artificial Sequence
  Synthetic oligonucleotide
gattcgtagcctttaagttttggattgttgcctct

SEQ ID NO: 3384 - DNA, 35 bp, Artificial Sequence
  Synthetic oligonucleotide
ggggccatttagtatgttgtttctttttacgatgc

SEQ ID NO: 3385 - DNA, 38 bp, Artificial Sequence
  Synthetic oligonucleotide
aaatcgaaatcgggccttttgaaacattgccttagtga

SEQ ID NO: 3386 - DNA, 38 bp, Artificial Sequence
  Synthetic oligonucleotide
ggggctaatcgttcgaatttcgctgtgccatttcttga

SEQ ID NO: 3387 - DNA, 37 bp, Artificial Sequence
  Synthetic oligonucleotide
tttcggatattaactttgcgacctcggggtctatcga

SEQ ID NO: 3388 - DNA, 38 bp, Artificial Sequence
  Synthetic oligonucleotide
tgcattctctcggttagttctgtctgtttttgttttga

SEQ ID NO: 3389 - DNA, 37 bp, Artificial Sequence
  Synthetic oligonucleotide
ttcactctacctctctcttgctctgggcttatagtga

SEQ ID NO: 3390 - DNA, 38 bp, Artificial Sequence
  Synthetic oligonucleotide
ggtttcgaattgttagttcctttagtatgatgccttga

SEQ ID NO: 3391 - DNA, 38 bp, Artificial Sequence
  Synthetic oligonucleotide
gaattgccttagttggaattgatgttatttgtttttga

SEQ ID NO: 3392 - DNA, 38 bp, Artificial Sequence
  Synthetic oligonucleotide
atttcctgcgtgggttcgcctcgaattgcccatcttga

SEQ ID NO: 3393 - DNA, 38 bp, Artificial Sequence
  Synthetic oligonucleotide
gcggagaagctttgtatgttttccaccttggttattga

SEQ ID NO: 3394 - DNA, 35 bp, Artificial Sequence
  Synthetic oligonucleotide
gaaccagctgttgattttaccgccttgcccttttc

SEQ ID NO: 3395 - DNA, 37 bp, Artificial Sequence
  Synthetic oligonucleotide
attttgcccgtgattcttattttgtcgctgattgaga

SEQ ID NO: 3396 - DNA, 37 bp, Artificial Sequence
  Synthetic oligonucleotide
tgcccccggtgtttgctttacctgtaagttttcgtga

SEQ ID NO: 3397 - DNA, 36 bp, Artificial Sequence
  Synthetic oligonucleotide
gctcaccgcgaatattttgcttgggatttctgggga

SEQ ID NO: 3398 - DNA, 35 bp, Artificial Sequence
  Synthetic oligonucleotide
agccttaatgaatgaaccatcaacgaattgctctt

SEQ ID NO: 3399 - DNA, 38 bp, Artificial Sequence
  Synthetic oligonucleotide
gtgacgattgcgaaattgacttctcctcttctgtatga

SEQ ID NO: 3400 - DNA, 38 bp, Artificial Sequence
  Synthetic oligonucleotide
gagttgaatgttacccctctgcacaatattttagttga

SEQ ID NO: 3401 - DNA, 38 bp, Artificial Sequence
  Synthetic oligonucleotide
gcgcaccttggggtttagtcatattacttggttcttga

SEQ ID NO: 3402 - DNA, 38 bp, Artificial Sequence
  Synthetic oligonucleotide
ttttggcctaactccgggtttcgctttcctgcctgtga

SEQ ID NO: 3403 - DNA, 36 bp, Artificial Sequence
  Synthetic oligonucleotide
gagtgaggtttgatttgcctattttcagaggggttc

SEQ ID NO: 3404 - DNA, 38 bp, Artificial Sequence
  Synthetic oligonucleotide
gacggtggtcttggggggggttttgttttccagtatga

SEQ ID NO: 3405 - DNA, 37 bp, Artificial Sequence
  Synthetic oligonucleotide
ttcaggtaggagcatttggtggtcttcgctttcttga

SEQ ID NO: 3406 - DNA, 35 bp, Artificial Sequence
  Synthetic oligonucleotide
tcgggtaggttatccctgtatcaccttttttttgc

SEQ ID NO: 3407 - DNA, 38 bp, Artificial Sequence
  Synthetic oligonucleotide
tcactcatgcacttttgagctttgttgctgaattttga

SEQ ID NO: 3408 - DNA, 38 bp, Artificial Sequence
  Synthetic oligonucleotide
acacgcgctttggttattgtgcttttgcttcaccgtga

SEQ ID NO: 3409 - DNA, 35 bp, Artificial Sequence
  Synthetic oligonucleotide
ttatatctggttgacttttttttgcgggttgcacc

SEQ ID NO: 3410 - DNA, 38 bp, Artificial Sequence
  Synthetic oligonucleotide
ggttgcttatgggtcgtaccatttgcatgattctttga

SEQ ID NO: 3411 - DNA, 37 bp, Artificial Sequence
  Synthetic oligonucleotide
tgcccgtccttggttttcacgtgatttgattgtgcga

SEQ ID NO: 3412 - DNA, 37 bp, Artificial Sequence
  Synthetic oligonucleotide
tgcttctgtaagcggagctattaataggtatctttga

SEQ ID NO: 3413 - DNA, 38 bp, Artificial Sequence
  Synthetic oligonucleotide
ttttccatggttgtttttgcctcatcctctcctagtga

SEQ ID NO: 3414 - DNA, 38 bp, Artificial Sequence
  Synthetic oligonucleotide
agcaccccgatcgttaggggttctgttaaattctttga

SEQ ID NO: 3415 - DNA, 36 bp, Artificial Sequence
  Synthetic oligonucleotide
atttcttgccgttgccctgtttttttgtttatgaaa

SEQ ID NO: 3416 - DNA, 38 bp, Artificial Sequence
  Synthetic oligonucleotide
ttatgcaattttcttccgcttggaccataacaggttga

SEQ ID NO: 3417 - DNA, 38 bp, Artificial Sequence
  Synthetic oligonucleotide
tctttggtccgtgtaaataattttgcctgcttttttga

SEQ ID NO: 3418 - DNA, 35 bp, Artificial Sequence
  Synthetic oligonucleotide
aacgcgtactgagcaataaagcttttgccgtgttt

SEQ ID NO: 3419 - DNA, 38 bp, Artificial Sequence
  Synthetic oligonucleotide
agtgagtcgacgacgacgtttctcgatatcccccttga

SEQ ID NO: 3420 - DNA, 37 bp, Artificial Sequence
  Synthetic oligonucleotide
tttgttccattttttatgcattgttttcagtacgtga

SEQ ID NO: 3421 - DNA, 38 bp, Artificial Sequence
  Synthetic oligonucleotide
ttttagctctcatttggttgaggattattctgctttga

SEQ ID NO: 3422 - DNA, 37 bp, Artificial Sequence
  Synthetic oligonucleotide
ttccttagggggtttgacctcatggtccttcgtgtga

SEQ ID NO: 3423 - DNA, 38 bp, Artificial Sequence
  Synthetic oligonucleotide
ttacaatgattttcgaaccgggggttcgagctatttga

SEQ ID NO: 3424 - DNA, 35 bp, Artificial Sequence
  Synthetic oligonucleotide
gttcgcttggccgtggacttcctatattaaatttg

SEQ ID NO: 3425 - DNA, 35 bp, Artificial Sequence
  Synthetic oligonucleotide
gcccttttgctttttgagggatttaacatgcttgg

SEQ ID NO: 3426 - DNA, 35 bp, Artificial Sequence
  Synthetic oligonucleotide
ggaaatagaattgtaggattctctagtgcttttct

SEQ ID NO: 3427 - DNA, 36 bp, Artificial Sequence
  Synthetic oligonucleotide
gaccgtgttcggaccggatgtccgacttcttcttga

SEQ ID NO: 3428 - DNA, 38 bp, Artificial Sequence
  Synthetic oligonucleotide
gagtaatcgtaaattttgccccgctggctctggcttga

SEQ ID NO: 3429 - DNA, 35 bp, Artificial Sequence
  Synthetic oligonucleotide
ttactccttgacgattgtgagttctctttagaagc

SEQ ID NO: 3430 - DNA, 38 bp, Artificial Sequence
  Synthetic oligonucleotide
gcacgggaaggtactgctcgtcatattaacttggttga

SEQ ID NO: 3431 - DNA, 37 bp, Artificial Sequence
  Synthetic oligonucleotide
tccgtagatccgccccaagcatgggtttttagtttga

SEQ ID NO: 3432 - DNA, 36 bp, Artificial Sequence
  Synthetic oligonucleotide
ttctatgcaaagctccaacggtggagtggttttcta

SEQ ID NO: 3433 - DNA, 38 bp, Artificial Sequence
  Synthetic oligonucleotide
tctttatctagcttggtgggctatgcaagcccatttga

SEQ ID NO: 3434 - DNA, 38 bp, Artificial Sequence
  Synthetic oligonucleotide
atcccgttttttacctttgtgagcattatgccgcttga

SEQ ID NO: 3435 - DNA, 37 bp, Artificial Sequence
  Synthetic oligonucleotide
gttttcgcgagttatttccgtaatctgctcttagtga

SEQ ID NO: 3436 - DNA, 35 bp, Artificial Sequence
  Synthetic oligonucleotide
aaattaaacctttgcgcgttttggtgccctttgaa

SEQ ID NO: 3437 - DNA, 36 bp, Artificial Sequence
  Synthetic oligonucleotide
ttttgccgttttccatttatccgtgtaaatgattca

SEQ ID NO: 3438 - DNA, 36 bp, Artificial Sequence
  Synthetic oligonucleotide
gtggtaccatttgactccaacggtgattattgctta

SEQ ID NO: 3439 - DNA, 38 bp, Artificial Sequence
  Synthetic oligonucleotide
gcggtcgttttgacttgtcttcggtctcattggattga

SEQ ID NO: 3440 - DNA, 36 bp, Artificial Sequence
  Synthetic oligonucleotide
gagtggaacgttagctttactttggtgggatcttga

SEQ ID NO: 3441 - DNA, 37 bp, Artificial Sequence
  Synthetic oligonucleotide
acggttcgcactgttcaacgtggtttctccttgggga

SEQ ID NO: 3442 - DNA, 35 bp, Artificial Sequence
  Synthetic oligonucleotide
attgctgtgcctgactatttgaacctttgaccgta

SEQ ID NO: 3443 - DNA, 36 bp, Artificial Sequence
  Synthetic oligonucleotide
attgtttttatttttgccatagggtgtgccttagta

SEQ ID NO: 3444 - DNA, 37 bp, Artificial Sequence
  Synthetic oligonucleotide
acgtcaaccatatgattagctttgttgcccttggaga

SEQ ID NO: 3445 - DNA, 38 bp, Artificial Sequence
  Synthetic oligonucleotide
atttcaaattgctttgctggacggtgctccttacttga

SEQ ID NO: 3446 - DNA, 35 bp, Artificial Sequence
  Synthetic oligonucleotide
tttgcatgaagccattgaccggattggattcttta

SEQ ID NO: 3447 - DNA, 38 bp, Artificial Sequence
  Synthetic oligonucleotide
tcctggagcttctacgtaaatttgatgccttttgatga

SEQ ID NO: 3448 - DNA, 37 bp, Artificial Sequence
  Synthetic oligonucleotide
acagaggtacgttgattctcctcccttgttagcccta

SEQ ID NO: 3449 - DNA, 38 bp, Artificial Sequence
  Synthetic oligonucleotide
attgcatggggattctgcctatgttggttctgttttga

SEQ ID NO: 3450 - DNA, 35 bp, Artificial Sequence
  Synthetic oligonucleotide
gccacgtattcatcacatggggggatgtccttgtt

SEQ ID NO: 3451 - DNA, 36 bp, Artificial Sequence
  Synthetic oligonucleotide
aatgcatcgatgagccattgacttgtttggtttgta

SEQ ID NO: 3452 - DNA, 35 bp, Artificial Sequence
  Synthetic oligonucleotide
attttgatcacatgtgttgtgtaccatttgctatt

SEQ ID NO: 3453 - DNA, 35 bp, Artificial Sequence
  Synthetic oligonucleotide
tgtttgttgcccgctcggcgcagttaccctttgct

SEQ ID NO: 3454 - DNA, 38 bp, Artificial Sequence
  Synthetic oligonucleotide
tgccacccgtgtttggggccctagtgtttttttcgtga

SEQ ID NO: 3455 - DNA, 38 bp, Artificial Sequence
  Synthetic oligonucleotide
cgtcagtaattgcagcatgacaatttcctgcttgttga

SEQ ID NO: 3456 - DNA, 38 bp, Artificial Sequence
  Synthetic oligonucleotide
tgttccctgattttgccactggacctagtaggatttga

SEQ ID NO: 3457 - DNA, 35 bp, Artificial Sequence
  Synthetic oligonucleotide
catgccgaaacgatggtttggatcgtgctcctctg

SEQ ID NO: 3458 - DNA, 38 bp, Artificial Sequence
  Synthetic oligonucleotide
ttcgctatccgggtgatcgctgtggaggtatttcttga

SEQ ID NO: 3459 - DNA, 38 bp, Artificial Sequence
  Synthetic oligonucleotide
tctaattttttgcgtggttctggcctatcaaagtttga

SEQ ID NO: 3460 - DNA, 38 bp, Artificial Sequence
  Synthetic oligonucleotide
gcttccttctgggtgacgggtgatccccgtgcttgtga

SEQ ID NO: 3461 - DNA, 36 bp, Artificial Sequence
  Synthetic oligonucleotide
gagtacactcaattttagtttggtgcatgccctgca

SEQ ID NO: 3462 - DNA, 37 bp, Artificial Sequence
  Synthetic oligonucleotide
ttgctctgttcttaccgcccagtgaacgcgtgttcga

SEQ ID NO: 3463 - DNA, 38 bp, Artificial Sequence
  Synthetic oligonucleotide
acgtgcacaatgttggattgtttttgccctttgtatga

SEQ ID NO: 3464 - DNA, 37 bp, Artificial Sequence
  Synthetic oligonucleotide
tatttgcccgattgtgaaggtgtagcccttgatctga

SEQ ID NO: 3465 - DNA, 38 bp, Artificial Sequence
  Synthetic oligonucleotide
tcgacttgccagggacttttgcatccgccttgatatga

SEQ ID NO: 3466 - DNA, 35 bp, Artificial Sequence
  Synthetic oligonucleotide
gcagggccgcctgttaaggttcctaatttgccgtt

SEQ ID NO: 3467 - DNA, 37 bp, Artificial Sequence
  Synthetic oligonucleotide
ccgttggtgggacacccctgatcttgcctcttattga

SEQ ID NO: 3468 - DNA, 35 bp, Artificial Sequence
  Synthetic oligonucleotide
acccgatagctttgaggtttgtttttctgtgcctt

SEQ ID NO: 3469 - DNA, 36 bp, Artificial Sequence
  Synthetic oligonucleotide
tctagcgtttgcttaccgcacactttctgtgaaaaa

SEQ ID NO: 3470 - DNA, 38 bp, Artificial Sequence
  Synthetic oligonucleotide
gagctttagaggcgcttgagggcgactttcctgtttga

SEQ ID NO: 3471 - DNA, 35 bp, Artificial Sequence
  Synthetic oligonucleotide
aatagaatgatttgtccggtcccgtatttcttgct

SEQ ID NO: 3472 - DNA, 37 bp, Artificial Sequence
  Synthetic oligonucleotide
ttcgtaacgttgaccgtgttgtttcgtttatgcctga

SEQ ID NO: 3473 - DNA, 38 bp, Artificial Sequence
  Synthetic oligonucleotide
agacccgtgaggatacatttttgtttaatttggcttga

SEQ ID NO: 3474 - DNA, 37 bp, Artificial Sequence
  Synthetic oligonucleotide
ttaacgcccaagctcggggaccgtgttctgtttttga

SEQ ID NO: 3475 - DNA, 38 bp, Artificial Sequence
  Synthetic oligonucleotide
gcatggttttgttcgaatatttccgaatcacgatttga

SEQ ID NO: 3476 - DNA, 37 bp, Artificial Sequence
  Synthetic oligonucleotide
ttgcaaatggaacctatgccctgttttaatgacttga

SEQ ID NO: 3477 - DNA, 37 bp, Artificial Sequence
  Synthetic oligonucleotide
attttatcggttttgtacctgatttgctttgattgga

SEQ ID NO: 3478 - DNA, 35 bp, Artificial Sequence
  Synthetic oligonucleotide
agtggacgcgttacctcacttttgcttgaatttgc

SEQ ID NO: 3479 - DNA, 35 bp, Artificial Sequence
  Synthetic oligonucleotide
atgtttgttgttgttcctccccttatgacttaatc

SEQ ID NO: 3480 - DNA, 38 bp, Artificial Sequence
  Synthetic oligonucleotide
tttgcctgtgaggtaaatctcatagtatccgtttttga

SEQ ID NO: 3481 - DNA, 35 bp, Artificial Sequence
  Synthetic oligonucleotide
ttttgcttcgtgtggtggttaactttcgcgcttac

SEQ ID NO: 3482 - DNA, 35 bp, Artificial Sequence
  Synthetic oligonucleotide
tgatcaatctggtccctcttttttggagtcttcac

SEQ ID NO: 3483 - DNA, 37 bp, Artificial Sequence
  Synthetic oligonucleotide
ttagcattcgccttccaaacccacgggtttgccttga

SEQ ID NO: 3484 - DNA, 37 bp, Artificial Sequence
  Synthetic oligonucleotide
acacggttgtccctggattagctctttgatttggtga

SEQ ID NO: 3485 - DNA, 37 bp, Artificial Sequence
  Synthetic oligonucleotide
ttcactcgaggtttcggttttataaatttctgtacga

SEQ ID NO: 3486 - DNA, 38 bp, Artificial Sequence
  Synthetic oligonucleotide
cccaacttggtttctgtttatgatctattcggtgatga

SEQ ID NO: 3487 - DNA, 36 bp, Artificial Sequence
  Synthetic oligonucleotide
attgcccttgtttggtgtgtgtatttttctcatgta

SEQ ID NO: 3488 - DNA, 37 bp, Artificial Sequence
  Synthetic oligonucleotide
actttctgggtttacttctggtggtttccatgtatga

SEQ ID NO: 3489 - DNA, 35 bp, Artificial Sequence
  Synthetic oligonucleotide
ttttgaccctgcgaaccgaatgaccgtaatcgtta

SEQ ID NO: 3490 - DNA, 38 bp, Artificial Sequence
  Synthetic oligonucleotide
gattcttcaactcgggttgacacctgttcgccttttga

SEQ ID NO: 3491 - DNA, 38 bp, Artificial Sequence
  Synthetic oligonucleotide
ggtggtcctttgttgacggaatttatttggttctctga

SEQ ID NO: 3492 - DNA, 37 bp, Artificial Sequence
  Synthetic oligonucleotide
tatttcttccgtgttttccatactgtgatgatggaga

SEQ ID NO: 3493 - DNA, 35 bp, Artificial Sequence
  Synthetic oligonucleotide
tttggctctttagcacacgggtttctagttccgtt

SEQ ID NO: 3494 - DNA, 38 bp, Artificial Sequence
  Synthetic oligonucleotide
ggaagtactgtactccgaatcggatcggatttttttga

SEQ ID NO: 3495 - DNA, 35 bp, Artificial Sequence
  Synthetic oligonucleotide
aataggaacttgccctcgcttttaattgttgcctt

SEQ ID NO: 3496 - DNA, 38 bp, Artificial Sequence
  Synthetic oligonucleotide
ttttctgacttttggggtggtctaaatatacttggtga

SEQ ID NO: 3497 - DNA, 35 bp, Artificial Sequence
  Synthetic oligonucleotide
aatttgcctcgtttttccgggtcctgaagggatct

SEQ ID NO: 3498 - DNA, 35 bp, Artificial Sequence
  Synthetic oligonucleotide
tcgacttaatgtcttattcggagccctacttgaaa

SEQ ID NO: 3499 - DNA, 38 bp, Artificial Sequence
  Synthetic oligonucleotide
gccgctaacgctgaaccgacgttgttaaatccgtgtga

SEQ ID NO: 3500 - DNA, 38 bp, Artificial Sequence
  Synthetic oligonucleotide
ttccttgatggggttcgcctttttctgccaactattga

SEQ ID NO: 3501 - DNA, 35 bp, Artificial Sequence
  Synthetic oligonucleotide
gcaccgaagagtacgtttcgaccttggattattgc

SEQ ID NO: 3502 - DNA, 35 bp, Artificial Sequence
  Synthetic oligonucleotide
tactgtcctattccccgtagttttttgtacctgga

SEQ ID NO: 3503 - DNA, 38 bp, Artificial Sequence
  Synthetic oligonucleotide
ttgcgaacttggttagcccgcctagagggttgatttga

SEQ ID NO: 3504 - DNA, 36 bp, Artificial Sequence
  Synthetic oligonucleotide
gaatgtcaccttgtggtagtgggtttctggttttga

SEQ ID NO: 3505 - DNA, 37 bp, Artificial Sequence
  Synthetic oligonucleotide
tgaaccacttagatccgttccttaaccctgcttatga

SEQ ID NO: 3506 - DNA, 35 bp, Artificial Sequence
  Synthetic oligonucleotide
ttaatcccctttcttctcgcttatgaagaaactta

SEQ ID NO: 3507 - DNA, 37 bp, Artificial Sequence
  Synthetic oligonucleotide
gagtgcgggttgatcacttggtggggtatcttcttga

SEQ ID NO: 3508 - DNA, 35 bp, Artificial Sequence
  Synthetic oligonucleotide
tcaacacgctgaccatatgttacttgtgccctgct

SEQ ID NO: 3509 - DNA, 36 bp, Artificial Sequence
  Synthetic oligonucleotide
aattctctcagtttcgctcgtagcgagtttttgcca

SEQ ID NO: 3510 - DNA, 38 bp, Artificial Sequence
  Synthetic oligonucleotide
aagttctttgccctttctttgctacctgaataatatga

SEQ ID NO: 3511 - DNA, 38 bp, Artificial Sequence
  Synthetic oligonucleotide
tgcagtatggacacagtgggtattttgttgtttggtga

SEQ ID NO: 3512 - DNA, 38 bp, Artificial Sequence
  Synthetic oligonucleotide
ttggagctgtactcccgctttatatctgtatctcgtga

SEQ ID NO: 3513 - DNA, 35 bp, Artificial Sequence
  Synthetic oligonucleotide
actttaacgaaactttgccgtatttcgtttgattc

SEQ ID NO: 3514 - DNA, 38 bp, Artificial Sequence
  Synthetic oligonucleotide
acattgtaaatcccaattctgatggtttgtttgtttga

SEQ ID NO: 3515 - DNA, 38 bp, Artificial Sequence
  Synthetic oligonucleotide
atccggtttgatcttcggagatgatatgaaatttgtga

SEQ ID NO: 3516 - DNA, 35 bp, Artificial Sequence
  Synthetic oligonucleotide
acggcgtgagccatggaaaagtaaattttgcccga

SEQ ID NO: 3517 - DNA, 35 bp, Artificial Sequence
  Synthetic oligonucleotide
atccaaaacataacctttgccgggggtattctctt

SEQ ID NO: 3518 - DNA, 38 bp, Artificial Sequence
  Synthetic oligonucleotide
ttgctcggtcaaatattgttcgttgtttcaacccgtga

SEQ ID NO: 3519 - DNA, 38 bp, Artificial Sequence
  Synthetic oligonucleotide
attgcatatccgttttctcaactgtaccgcttgggtga

SEQ ID NO: 3520 - DNA, 35 bp, Artificial Sequence
  Synthetic oligonucleotide
acctggaccggtgtcgaaccggaaatctgccctct

SEQ ID NO: 3521 - DNA, 38 bp, Artificial Sequence
  Synthetic oligonucleotide
catgcagtgggtaactaaacgcttctgtatactggtga

SEQ ID NO: 3522 - DNA, 35 bp, Artificial Sequence
  Synthetic oligonucleotide
tcatgaagcttggcttctgaaatccacacgatttt

SEQ ID NO: 3523 - DNA, 35 bp, Artificial Sequence
  Synthetic oligonucleotide
gcacccggttttgtttaactgcttgtaggaccacc

SEQ ID NO: 3524 - DNA, 35 bp, Artificial Sequence
  Synthetic oligonucleotide
ttttcgccgtgaggaataccgttgggtcctttgtt

SEQ ID NO: 3525 - DNA, 38 bp, Artificial Sequence
  Synthetic oligonucleotide
tcgttaaattgggcttgcctgtgccttttttcccgtga

SEQ ID NO: 3526 - DNA, 38 bp, Artificial Sequence
  Synthetic oligonucleotide
attgggggtcaccttgggtttggatgttttttgtttga

SEQ ID NO: 3527 - DNA, 37 bp, Artificial Sequence
  Synthetic oligonucleotide
ttgacgaaattacccggtattgtgcttataaattgga

SEQ ID NO: 3528 - DNA, 37 bp, Artificial Sequence
  Synthetic oligonucleotide
tgcgattgattccttccgtgccgttttgaaactatga

SEQ ID NO: 3529 - DNA, 36 bp, Artificial Sequence
  Synthetic oligonucleotide
tctgtgccaataactctaaatgccgcttagtttgaa

SEQ ID NO: 3530 - DNA, 38 bp, Artificial Sequence
  Synthetic oligonucleotide
atggtgatcggtggtttgttactctgtccgtttcttga

SEQ ID NO: 3531 - DNA, 35 bp, Artificial Sequence
  Synthetic oligonucleotide
gcccggttacgtaccttggggtgtttgtctcttgc

SEQ ID NO: 3532 - DNA, 35 bp, Artificial Sequence
  Synthetic oligonucleotide
tgcgagtcctctgaatctgatcctaaacttcttgc

SEQ ID NO: 3533 - DNA, 38 bp, Artificial Sequence
  Synthetic oligonucleotide
actccggccttcttctgtatcggtttttttgctgttga

SEQ ID NO: 3534 - DNA, 35 bp, Artificial Sequence
  Synthetic oligonucleotide
tcgactcttgtgccatggtttccttatctggtatt

SEQ ID NO: 3535 - DNA, 36 bp, Artificial Sequence
  Synthetic oligonucleotide
ttcgatctgtgcgaacagattttgttttgccctgga

SEQ ID NO: 3536 - DNA, 35 bp, Artificial Sequence
  Synthetic oligonucleotide
ttcgtcgtttaaacacatttgtccgctatgcctta

SEQ ID NO: 3537 - DNA, 37 bp, Artificial Sequence
  Synthetic oligonucleotide
atggaaggggttccatttcctttatttgggttttcga

SEQ ID NO: 3538 - DNA, 37 bp, Artificial Sequence
  Synthetic oligonucleotide
tgcttgggtgcaatgcgaacgcatattaatttgttga

SEQ ID NO: 3539 - DNA, 35 bp, Artificial Sequence
  Synthetic oligonucleotide
gcattgtgtaacttcggtttttttggaattttcgc

SEQ ID NO: 3540 - DNA, 36 bp, Artificial Sequence
  Synthetic oligonucleotide
gggtccaaacggcttggccattttctctatttctga

SEQ ID NO: 3541 - DNA, 38 bp, Artificial Sequence
  Synthetic oligonucleotide
gataatcttgctccgtagaaacatacttactctggtga

SEQ ID NO: 3542 - DNA, 35 bp, Artificial Sequence
  Synthetic oligonucleotide
atcgagtgtctcccgttttatctttgattgtttgc

SEQ ID NO: 3543 - DNA, 36 bp, Artificial Sequence
  Synthetic oligonucleotide
tctctgtattcgtttttctgatatttggttgtagaa

SEQ ID NO: 3544 - DNA, 36 bp, Artificial Sequence
  Synthetic oligonucleotide
tctcctgggtcccgttcggttatattatgcttgtga

SEQ ID NO: 3545 - DNA, 38 bp, Artificial Sequence
  Synthetic oligonucleotide
accgctcccttttgttcgggcttggccaatttccttga

SEQ ID NO: 3546 - DNA, 35 bp, Artificial Sequence
  Synthetic oligonucleotide
aggccaattttatagcggtgactcacttttgccct

SEQ ID NO: 3547 - DNA, 38 bp, Artificial Sequence
  Synthetic oligonucleotide
gggtgaggtaccttctccgtgtgattctccgtttttga

SEQ ID NO: 3548 - DNA, 38 bp, Artificial Sequence
  Synthetic oligonucleotide
gaaacgtgattataccgacttgttgcttacgaatttga

SEQ ID NO: 3549 - DNA, 36 bp, Artificial Sequence
  Synthetic oligonucleotide
ttgcctgagagatgccgctttgttcttcgtaatcta

SEQ ID NO: 3550 - DNA, 38 bp, Artificial Sequence
  Synthetic oligonucleotide
ttctctgacccggtttttttacatatgtgacgttttga

SEQ ID NO: 3551 - DNA, 38 bp, Artificial Sequence
  Synthetic oligonucleotide
tgcacctcgtaaaaaaactcgggtctggaatttcgtga

SEQ ID NO: 3552 - DNA, 38 bp, Artificial Sequence
  Synthetic oligonucleotide
cataaactctccttcctgcactcttccggattacttga

SEQ ID NO: 3553 - DNA, 35 bp, Artificial Sequence
  Synthetic oligonucleotide
acccgggtttgcatactgttcttctgtccttatga

SEQ ID NO: 3554 - DNA, 38 bp, Artificial Sequence
  Synthetic oligonucleotide
tctgaaactagcatgagccttactgacctgatgtttga

SEQ ID NO: 3555 - DNA, 35 bp, Artificial Sequence
  Synthetic oligonucleotide
tattgcccgccactttctgaatgatttgatctgct

SEQ ID NO: 3556 - DNA, 37 bp, Artificial Sequence
  Synthetic oligonucleotide
gacgcaccaaattatgcaatacaaattctgcccttga

SEQ ID NO: 3557 - DNA, 35 bp, Artificial Sequence
  Synthetic oligonucleotide
gggttacgttattctccggtaccttgggtttaaaa

SEQ ID NO: 3558 - DNA, 35 bp, Artificial Sequence
  Synthetic oligonucleotide
gacaactcccgtgaggagtttctgattttatgttt

SEQ ID NO: 3559 - DNA, 38 bp, Artificial Sequence
  Synthetic oligonucleotide
ttactagccggtggatctgcccacgttcgtttttttga

SEQ ID NO: 3560 - DNA, 38 bp, Artificial Sequence
  Synthetic oligonucleotide
gcacaaattgcccggtataattgttatacgctatgtga

SEQ ID NO: 3561 - DNA, 37 bp, Artificial Sequence
  Synthetic oligonucleotide
taccgaggtcgagggatttttgtttgtccttatgtga

SEQ ID NO: 3562 - DNA, 36 bp, Artificial Sequence
  Synthetic oligonucleotide
aaaattgccggcgccgtagccttgttttcatcttta

SEQ ID NO: 3563 - DNA, 38 bp, Artificial Sequence
  Synthetic oligonucleotide
tccgcgggccgtaatttggttagattttctgtttgtga

SEQ ID NO: 3564 - DNA, 37 bp, Artificial Sequence
  Synthetic oligonucleotide
ttgcctcgctttgaccagtgttcctgtttctccttga

SEQ ID NO: 3565 - DNA, 38 bp, Artificial Sequence
  Synthetic oligonucleotide
gggcggaccgcctggggttttgaaccttacaatcttga

SEQ ID NO: 3566 - DNA, 38 bp, Artificial Sequence
  Synthetic oligonucleotide
gagtacgtgaccggtgaaaaatattgggatgtgtgtga

SEQ ID NO: 3567 - DNA, 37 bp, Artificial Sequence
  Synthetic oligonucleotide
tttgcgcgtgagcgttataaaattttccgactaccga

SEQ ID NO: 3568 - DNA, 38 bp, Artificial Sequence
  Synthetic oligonucleotide
ggtcgccttgccacaccgataatcgttgaattttgtga

SEQ ID NO: 3569 - DNA, 35 bp, Artificial Sequence
  Synthetic oligonucleotide
tgccgctggacactatatatggtttctgaaatgcc

SEQ ID NO: 3570 - DNA, 38 bp, Artificial Sequence
  Synthetic oligonucleotide
gagaacgcacaagttgccacgaggtttatttgccttga

SEQ ID NO: 3571 - DNA, 37 bp, Artificial Sequence
  Synthetic oligonucleotide
tgccctgtaaaacctcggacggtttcctgtttgttga

SEQ ID NO: 3572 - DNA, 35 bp, Artificial Sequence
  Synthetic oligonucleotide
tccatctaagattatctcgtatcacactattaaat

SEQ ID NO: 3573 - DNA, 37 bp, Artificial Sequence
  Synthetic oligonucleotide
tatcaacccaaactaaccgctcaataatgaattaaga

SEQ ID NO: 3574 - DNA, 36 bp, Artificial Sequence
  Synthetic oligonucleotide
agtcagtactaaactctctaaacatctggatccaaa

SEQ ID NO: 3575 - DNA, 36 bp, Artificial Sequence
  Synthetic oligonucleotide
ttcgcaagtccaggatcgcgactaaataccttacaa

SEQ ID NO: 3576 - DNA, 36 bp, Artificial Sequence
  Synthetic oligonucleotide
tgcctcatcccgaatagttttgtcaacccatccaca

SEQ ID NO: 3577 - DNA, 37 bp, Artificial Sequence
  Synthetic oligonucleotide
acactctaccaaatagccactcgcaaacatataaaga

SEQ ID NO: 3578 - DNA, 36 bp, Artificial Sequence
  Synthetic oligonucleotide
tcgtcactcactcaatatccttggtacctactcaaa

SEQ ID NO: 3579 - DNA, 36 bp, Artificial Sequence
  Synthetic oligonucleotide
tgcaggcccctgtgaacacctttattgaatagcaca

SEQ ID NO: 3580 - DNA, 35 bp, Artificial Sequence
  Synthetic oligonucleotide
gcactgtgacctaccactttgacctctgtttaaac

SEQ ID NO: 3581 - DNA, 36 bp, Artificial Sequence
  Synthetic oligonucleotide
acctcgaccatctacaaactttgaagccacaccaaa

SEQ ID NO: 3582 - DNA, 36 bp, Artificial Sequence
  Synthetic oligonucleotide
taagcctgactccatcgtctattattttttttaagc

SEQ ID NO: 3583 - DNA, 35 bp, Artificial Sequence
  Synthetic oligonucleotide
atcgccacgaccaaccaccacggatcccacataaa

SEQ ID NO: 3584 - DNA, 36 bp, Artificial Sequence
  Synthetic oligonucleotide
tactcgacgaaatagctaacaacggacccgataaaa

SEQ ID NO: 3585 - DNA, 37 bp, Artificial Sequence
  Synthetic oligonucleotide
aaatcatccgtagtttatcctttgtctccatccaaga

SEQ ID NO: 3586 - DNA, 35 bp, Artificial Sequence
  Synthetic oligonucleotide
gggaacgtaactcaggtttttttcatcccaacaca

SEQ ID NO: 3587 - DNA, 38 bp, Artificial Sequence
  Synthetic oligonucleotide
aactcggccacccgtagacgtatatccaattcacttga

SEQ ID NO: 3588 - DNA, 37 bp, Artificial Sequence
  Synthetic oligonucleotide
ctgcagcttgatcttcgtcacaacacatctattacga

SEQ ID NO: 3589 - DNA, 38 bp, Artificial Sequence
  Synthetic oligonucleotide
ccttccaatctgcatcgctaacgcatacaccattatga

SEQ ID NO: 3590 - DNA, 38 bp, Artificial Sequence
  Synthetic oligonucleotide
gatctattcaccttagccataattatagaccccaatga

SEQ ID NO: 3591 - DNA, 35 bp, Artificial Sequence
  Synthetic oligonucleotide
ccgtactgtttacacatatctatccacgtattaca

SEQ ID NO: 3592 - DNA, 35 bp, Artificial Sequence
  Synthetic oligonucleotide
acgtctgccaaatctactcgcattcgatacacacc

SEQ ID NO: 3593 - DNA, 35 bp, Artificial Sequence
  Synthetic oligonucleotide
ctgtcgacattccgctataaaattaccaacccaat

SEQ ID NO: 3594 - DNA, 36 bp, Artificial Sequence
  Synthetic oligonucleotide
gagtacgcaattattatccgaagtcaactatagcaa

SEQ ID NO: 3595 - DNA, 36 bp, Artificial Sequence
  Synthetic oligonucleotide
gagtaactagtcatcaattctatcttcgcacactaa

SEQ ID NO: 3596 - DNA, 35 bp, Artificial Sequence
  Synthetic oligonucleotide
atgcgctactgcctagctcccgctcgcccatataa

SEQ ID NO: 3597 - DNA, 36 bp, Artificial Sequence
  Synthetic oligonucleotide
acaatatcgatctccaaaactatctcgtgtatctca

SEQ ID NO: 3598 - DNA, 38 bp, Artificial Sequence
  Synthetic oligonucleotide
acgtacccgaccccggcgttaagccgtctttgtactga

SEQ ID NO: 3599 - DNA, 35 bp, Artificial Sequence
  Synthetic oligonucleotide
gtcactcattatatggttctacactacgatcatca

SEQ ID NO: 3600 - DNA, 36 bp, Artificial Sequence
  Synthetic oligonucleotide
gactccgtcgttcatttcactaacacgtatgccaga

SEQ ID NO: 3601 - DNA, 36 bp, Artificial Sequence
  Synthetic oligonucleotide
tagtacccacttattactatcggagttcaaacataa

SEQ ID NO: 3602 - DNA, 36 bp, Artificial Sequence
  Synthetic oligonucleotide
tcgagcgcacagattcgttttccaccgcgaacttca

SEQ ID NO: 3603 - DNA, 37 bp, Artificial Sequence
  Synthetic oligonucleotide
gccacgtttcctactttcgttcgttcgccacgtagga

SEQ ID NO: 3604 - DNA, 35 bp, Artificial Sequence
  Synthetic oligonucleotide
tcactgacccacctctcgatccccaattaaatatt

SEQ ID NO: 3605 - DNA, 36 bp, Artificial Sequence
  Synthetic oligonucleotide
cgcttcccgaatcgagagatcaagcgatcagccgta

SEQ ID NO: 3606 - DNA, 37 bp, Artificial Sequence
  Synthetic oligonucleotide
tcttacgtacgcttcgtagacaattattcatttctga

SEQ ID NO: 3607 - DNA, 38 bp, Artificial Sequence
  Synthetic oligonucleotide
tgctacacgaaacctgtactgctagctatctatcatga

SEQ ID NO: 3608 - DNA, 36 bp, Artificial Sequence
  Synthetic oligonucleotide
ctagctcttcagtcgcactcctagtctcaccattca

SEQ ID NO: 3609 - DNA, 35 bp, Artificial Sequence
  Synthetic oligonucleotide
tgaccattagttaactctatcttttgaaataatct

SEQ ID NO: 3610 - DNA, 36 bp, Artificial Sequence
  Synthetic oligonucleotide
agcctcataggcattccggtgtcacgcaaacacata

SEQ ID NO: 3611 - DNA, 38 bp, Artificial Sequence
  Synthetic oligonucleotide
tgccgtcccgggactcaatccacgtttttattttctca

SEQ ID NO: 3612 - DNA, 38 bp, Artificial Sequence
  Synthetic oligonucleotide
tgccgctaaggcagttactacagggtcttattacatga

SEQ ID NO: 3613 - DNA, 35 bp, Artificial Sequence
  Synthetic oligonucleotide
gaccccttgttaaatgtatccttgttaattacgat

SEQ ID NO: 3614 - DNA, 36 bp, Artificial Sequence
  Synthetic oligonucleotide
caaccgtcctctaatttcacgcctgtcggtcattca

SEQ ID NO: 3615 - DNA, 38 bp, Artificial Sequence
  Synthetic oligonucleotide
ctacaccactattcaaaacgaatatctcatcatactga

SEQ ID NO: 3616 - DNA, 36 bp, Artificial Sequence
  Synthetic oligonucleotide
ttgtacctgcactgcctcaagttattacatctcata

SEQ ID NO: 3617 - DNA, 38 bp, Artificial Sequence
  Synthetic oligonucleotide
taggcgagagcctttgacaggttaccaggtggtggtga

SEQ ID NO: 3618 - DNA, 37 bp, Artificial Sequence
  Synthetic oligonucleotide
agtgactgcgcaaatcactacaacttccatccaaaga

SEQ ID NO: 3619 - DNA, 37 bp, Artificial Sequence
  Synthetic oligonucleotide
gagtgactgctttgacctatacacacaaccaacttaa

SEQ ID NO: 3620 - DNA, 36 bp, Artificial Sequence
  Synthetic oligonucleotide
atttaaccctaaatatttcaacacacaaacaccaca

SEQ ID NO: 3621 - DNA, 38 bp, Artificial Sequence
  Synthetic oligonucleotide
ctctggactgcaacacagtgccgttccgaccttcttga

SEQ ID NO: 3622 - DNA, 36 bp, Artificial Sequence
  Synthetic oligonucleotide
tacttagtcttcttcggatcgcgaccgtggtcggta

SEQ ID NO: 3623 - DNA, 35 bp, Artificial Sequence
  Synthetic oligonucleotide
atatcgtacctattttctaatcttacgctgttcac

SEQ ID NO: 3624 - DNA, 38 bp, Artificial Sequence
  Synthetic oligonucleotide
cccccgcaccacattattccgatcatattatccattga

SEQ ID NO: 3625 - DNA, 35 bp, Artificial Sequence
  Synthetic oligonucleotide
acttaatattccattctcaattacactattcggtt

SEQ ID NO: 3626 - DNA, 38 bp, Artificial Sequence
  Synthetic oligonucleotide
ttcgtcactgctacttttatattaagcccatagaatga

SEQ ID NO: 3627 - DNA, 36 bp, Artificial Sequence
  Synthetic oligonucleotide
cctcgcatccgacttttacaatcacataatcacgta

SEQ ID NO: 3628 - DNA, 36 bp, Artificial Sequence
  Synthetic oligonucleotide
ttgaaagcccctcaatggccacctattttgcattca

SEQ ID NO: 3629 - DNA, 36 bp, Artificial Sequence
  Synthetic oligonucleotide
gagtactgtctctattccacaagcataactacttca

SEQ ID NO: 3630 - DNA, 38 bp, Artificial Sequence
  Synthetic oligonucleotide
aggcgactgccgcagtgccgctgtccgtttcatcatga

SEQ ID NO: 3631 - DNA, 38 bp, Artificial Sequence
  Synthetic oligonucleotide
aatgccaagtcttatcgctagcaataatattgaactga

SEQ ID NO: 3632 - DNA, 36 bp, Artificial Sequence
  Synthetic oligonucleotide
atcccctgtctgcatgcaggcctatgaccgcactca

SEQ ID NO: 3633 - DNA, 37 bp, Artificial Sequence
  Synthetic oligonucleotide
gggggcgggagctacgcaagcatgcctttgacattga

SEQ ID NO: 3634 - DNA, 38 bp, Artificial Sequence
  Synthetic oligonucleotide
taatttctctgcatctatctcaaagcaccactatctta

SEQ ID NO: 3635 - DNA, 36 bp, Artificial Sequence
  Synthetic oligonucleotide
acccatctaccgcattattaacgttataaccctaaa

SEQ ID NO: 3636 - DNA, 37 bp, Artificial Sequence
  Synthetic oligonucleotide
cctgcctatcgccccttcatattctcagatcagcaga

SEQ ID NO: 3637 - DNA, 36 bp, Artificial Sequence
  Synthetic oligonucleotide
ttctcgtctcggggctaatacacatacaattataca

SEQ ID NO: 3638 - DNA, 35 bp, Artificial Sequence
  Synthetic oligonucleotide
gctcattctattttagcatatcatccatctaatcg

SEQ ID NO: 3639 - DNA, 35 bp, Artificial Sequence
  Synthetic oligonucleotide
aatccgtcatgtattaaacacttctatcacattcg

SEQ ID NO: 3640 - DNA, 37 bp, Artificial Sequence
  Synthetic oligonucleotide
actcttctgaatcgaaaccaatctcactttcagggga

SEQ ID NO: 3641 - DNA, 36 bp, Artificial Sequence
  Synthetic oligonucleotide
ctaccatcacatcctatcatcgcatttagtcttgta

SEQ ID NO: 3642 - DNA, 35 bp, Artificial Sequence
  Synthetic oligonucleotide
ctaatcatctcttcaaattcaacggcgaacaaaac

SEQ ID NO: 3643 - DNA, 38 bp, Artificial Sequence
  Synthetic oligonucleotide
taagcacttccgttttaatctttacgacgcacccatga

SEQ ID NO: 3644 - DNA, 36 bp, Artificial Sequence
  Synthetic oligonucleotide
tactatcggcacttctacggaggataccctcgatta

SEQ ID NO: 3645 - DNA, 35 bp, Artificial Sequence
  Synthetic oligonucleotide
tgagctgccgctatggtgaccttctatcccattat

SEQ ID NO: 3646 - DNA, 36 bp, Artificial Sequence
  Synthetic oligonucleotide
ccttacagacggtcaccgtcttgcgggttattacaa

SEQ ID NO: 3647 - DNA, 36 bp, Artificial Sequence
  Synthetic oligonucleotide
ccagtcagtctgttactgtcttgttcccatccctca

SEQ ID NO: 3648 - DNA, 36 bp, Artificial Sequence
  Synthetic oligonucleotide
cgtttccacacgccgattcaaatccctcattaacca

SEQ ID NO: 3649 - DNA, 35 bp, Artificial Sequence
  Synthetic oligonucleotide
acctaacatcctatcaccgcttatgtattgcatca

SEQ ID NO: 3650 - DNA, 35 bp, Artificial Sequence
  Synthetic oligonucleotide
gcagtaggttgtgatgctagctaattatactatac

SEQ ID NO: 3651 - DNA, 38 bp, Artificial Sequence
  Synthetic oligonucleotide
cccgccgcacgtccaatattcaaccatgaccttactga

SEQ ID NO: 3652 - DNA, 35 bp, Artificial Sequence
  Synthetic oligonucleotide
atcgccatcatcgctttatctggtcgtgggaaccc

SEQ ID NO: 3653 - DNA, 36 bp, Artificial Sequence
  Synthetic oligonucleotide
tgtcatccgttatttcattcaccttctactatgtaa

SEQ ID NO: 3654 - DNA, 37 bp, Artificial Sequence
  Synthetic oligonucleotide
tactattatcatccacgccatcagccgggtcttcgga

SEQ ID NO: 3655 - DNA, 38 bp, Artificial Sequence
  Synthetic oligonucleotide
ccttacatacatactccgcatacgtgcctatttaatga

SEQ ID NO: 3656 - DNA, 37 bp, Artificial Sequence
  Synthetic oligonucleotide
acaactatcaaataaacctgcgccctctattaatgga

SEQ ID NO: 3657 - DNA, 35 bp, Artificial Sequence
  Synthetic oligonucleotide
gcaccatcgccggactgctcatatccccgttgtaa

SEQ ID NO: 3658 - DNA, 37 bp, Artificial Sequence
  Synthetic oligonucleotide
ctcgcagtaatggtgcccacatgttacgtctctttga

SEQ ID NO: 3659 - DNA, 36 bp, Artificial Sequence
  Synthetic oligonucleotide
ttagtactgtcattcgaggattcgaatctagcttta

SEQ ID NO: 3660 - DNA, 36 bp, Artificial Sequence
  Synthetic oligonucleotide
tgtaaacgtacgatattacttccgatccatacatca

SEQ ID NO: 3661 - DNA, 37 bp, Artificial Sequence
  Synthetic oligonucleotide
attcaagcaatctagtaattattctttcactgccgga

SEQ ID NO: 3662 - DNA, 38 bp, Artificial Sequence
  Synthetic oligonucleotide
taccatctctattccacgtccacgacacgctgccatga

SEQ ID NO: 3663 - DNA, 36 bp, Artificial Sequence
  Synthetic oligonucleotide
tgttgacaatgccgctgtcccgtctacccttcgata

SEQ ID NO: 3664 - DNA, 35 bp, Artificial Sequence
  Synthetic oligonucleotide
catgtcgccgtcgcgcacagcctacatcccactta

SEQ ID NO: 3665 - DNA, 35 bp, Artificial Sequence
  Synthetic oligonucleotide
gagtacttctcataaacgaaatatcaaattcgaat

SEQ ID NO: 3666 - DNA, 38 bp, Artificial Sequence
  Synthetic oligonucleotide
tgactgcgaaactaacgtatccccatatatacaattga

SEQ ID NO: 3667 - DNA, 36 bp, Artificial Sequence
  Synthetic oligonucleotide
ttcagcgcgttcttcacagcggggtagcactcatca

SEQ ID NO: 3668 - DNA, 35 bp, Artificial Sequence
  Synthetic oligonucleotide
tcagtacatcattaatcaccatatcacgcattatc

SEQ ID NO: 3669 - DNA, 36 bp, Artificial Sequence
  Synthetic oligonucleotide
agtctactgcatcatctcccttactccaagtagtaa

SEQ ID NO: 3670 - DNA, 36 bp, Artificial Sequence
  Synthetic oligonucleotide
gctcatactcagcactgcgaattgccagtccttcac

SEQ ID NO: 3671 - DNA, 38 bp, Artificial Sequence
  Synthetic oligonucleotide
gctgcatctcgtcactccaggtggttggtacattgtga

SEQ ID NO: 3672 - DNA, 35 bp, Artificial Sequence
  Synthetic oligonucleotide
gttagctagaacgaacgcacgtcttctatctttta

SEQ ID NO: 3673 - DNA, 36 bp, Artificial Sequence
  Synthetic oligonucleotide
ttcgttattgccttagttacactctattataggtta

SEQ ID NO: 3674 - DNA, 37 bp, Artificial Sequence
  Synthetic oligonucleotide
tatcggacacttactacattaccgtcgcttataccga

SEQ ID NO: 3675 - DNA, 38 bp, Artificial Sequence
  Synthetic oligonucleotide
atcaacgtactcgaacgcgtccacaccccaccatctga

SEQ ID NO: 3676 - DNA, 38 bp, Artificial Sequence
  Synthetic oligonucleotide
gagctactctgaatctcattgatatctacaataaatga

SEQ ID NO: 3677 - DNA, 36 bp, Artificial Sequence
  Synthetic oligonucleotide
taataggacggcgggctcttgccgatatttcctgta

SEQ ID NO: 3678 - DNA, 35 bp, Artificial Sequence
  Synthetic oligonucleotide
catcttatacagctcagcctctattcccatacgtc

SEQ ID NO: 3679 - DNA, 36 bp, Artificial Sequence
  Synthetic oligonucleotide
ctgccggatcttgcacgcactgctattatatttcca

SEQ ID NO: 3680 - DNA, 35 bp, Artificial Sequence
  Synthetic oligonucleotide
actgcctaaggctatcgcatcaatatgaactcaac

SEQ ID NO: 3681 - DNA, 37 bp, Artificial Sequence
  Synthetic oligonucleotide
ctactgcacgacgcgagtccttatcaatatctcacga

SEQ ID NO: 3682 - DNA, 35 bp, Artificial Sequence
  Synthetic oligonucleotide
gagtacttacgtaacgagttattaatgtccaaaat

SEQ ID NO: 3683 - DNA, 36 bp, Artificial Sequence
  Synthetic oligonucleotide
aaggactcaatgccactatacgacttattccaatca

SEQ ID NO: 3684 - DNA, 35 bp, Artificial Sequence
  Synthetic oligonucleotide
cttttctagctagcatttacacttttatacacaac

SEQ ID NO: 3685 - DNA, 37 bp, Artificial Sequence
  Synthetic oligonucleotide
tcgggttctccctctcgccacctaggtttaaaacgga

SEQ ID NO: 3686 - DNA, 38 bp, Artificial Sequence
  Synthetic oligonucleotide
cgcatgcactgaacatatacacatctcgtcgctcctga

SEQ ID NO: 3687 - DNA, 36 bp, Artificial Sequence
  Synthetic oligonucleotide
ttacctctctacaccatttaccaacggctacgccga

SEQ ID NO: 3688 - DNA, 38 bp, Artificial Sequence
  Synthetic oligonucleotide
gacgtcttctttcacagcatgccgtaacagttttctga

SEQ ID NO: 3689 - DNA, 35 bp, Artificial Sequence
  Synthetic oligonucleotide
ctacagactaactagttcccgaattctgccacaac

SEQ ID NO: 3690 - DNA, 37 bp, Artificial Sequence
  Synthetic oligonucleotide
aatccacgtgcccaacataaagatctaactcacaaga

SEQ ID NO: 3691 - DNA, 36 bp, Artificial Sequence
  Synthetic oligonucleotide
tacgacgcctctgttaatccgtttttatataccaca

SEQ ID NO: 3692 - DNA, 38 bp, Artificial Sequence
  Synthetic oligonucleotide
ggcgggaatcacgccaaacctctgtcacctatcgctga

SEQ ID NO: 3693 - DNA, 38 bp, Artificial Sequence
  Synthetic oligonucleotide
cttctgccacttcatctcgtcaaggttcatttcgttga

SEQ ID NO: 3694 - DNA, 36 bp, Artificial Sequence
  Synthetic oligonucleotide
cgcacaacgtaccggtccagggaacacattttcgca

SEQ ID NO: 3695 - DNA, 38 bp, Artificial Sequence
  Synthetic oligonucleotide
ctctcaccagcacgtcccacacattttcacaaacctga

SEQ ID NO: 3696 - DNA, 38 bp, Artificial Sequence
  Synthetic oligonucleotide
tttctcgcgcggcaggcatccgttctaatataccatga

SEQ ID NO: 3697 - DNA, 36 bp, Artificial Sequence
  Synthetic oligonucleotide
accacaacttatcgcatctcattgattggactaata

SEQ ID NO: 3698 - DNA, 35 bp, Artificial Sequence
  Synthetic oligonucleotide
tcccctcagccatcgtggaacaactgcggtgtttc

SEQ ID NO: 3699 - DNA, 36 bp, Artificial Sequence
  Synthetic oligonucleotide
atacgtctgcgattatttagtggtctctcacacata

SEQ ID NO: 3700 - DNA, 36 bp, Artificial Sequence
  Synthetic oligonucleotide
cacgagtcgccacacctcagctgatgctcacctaca

SEQ ID NO: 3701 - DNA, 36 bp, Artificial Sequence
  Synthetic oligonucleotide
agctacgtaccgaatttcgttcataataggtaatga

SEQ ID NO: 3702 - DNA, 35 bp, Artificial Sequence
  Synthetic oligonucleotide
acacattcggccatgtcatcctgcacttcacgtga

SEQ ID NO: 3703 - DNA, 38 bp, Artificial Sequence
  Synthetic oligonucleotide
taaccatcgatcccaacacatgtcagcacggcacctga

SEQ ID NO: 3704 - DNA, 35 bp, Artificial Sequence
  Synthetic oligonucleotide
tacctagtccggccaccagtctcccacacattacg

SEQ ID NO: 3705 - DNA, 35 bp, Artificial Sequence
  Synthetic oligonucleotide
atgtctgcggaccatctatcggatcgccgaacctt

SEQ ID NO: 3706 - DNA, 37 bp, Artificial Sequence
  Synthetic oligonucleotide
cgcacttaccatgcgtatcctttatcggtctgaacga

SEQ ID NO: 3707 - DNA, 37 bp, Artificial Sequence
  Synthetic oligonucleotide
gagtcccggtcccccgggtccatcatctactccatga

SEQ ID NO: 3708 - DNA, 37 bp, Artificial Sequence
  Synthetic oligonucleotide
atctgctgttgtctttcccattagttatcccaatcga

SEQ ID NO: 3709 - DNA, 38 bp, Artificial Sequence
  Synthetic oligonucleotide
agccacacctaatagctcacatccggttaccgtcctga

SEQ ID NO: 3710 - DNA, 38 bp, Artificial Sequence
  Synthetic oligonucleotide
ccggctcagagccacgctatatcttcactactaactga

SEQ ID NO: 3711 - DNA, 37 bp, Artificial Sequence
  Synthetic oligonucleotide
gcgaagtttcacttccagtttctgacgcccttcatga

SEQ ID NO: 3712 - DNA, 36 bp, Artificial Sequence
  Synthetic oligonucleotide
tcctaggctgctcttcgccgcacaccggacttcaca

SEQ ID NO: 3713 - DNA, 38 bp, Artificial Sequence
  Synthetic oligonucleotide
catgcaccggtctcacggtcgcataataactatcatta

SEQ ID NO: 3714 - DNA, 38 bp, Artificial Sequence
  Synthetic oligonucleotide
tgtcaatatctgaatcggtggatattggcggaggttga

SEQ ID NO: 3715 - DNA, 37 bp, Artificial Sequence
  Synthetic oligonucleotide
gggtaccgtgcagactcacagaacctaatatatagga

SEQ ID NO: 3716 - DNA, 37 bp, Artificial Sequence
  Synthetic oligonucleotide
tttaccctgcatcgatcgcgagacccaccaatcatga

SEQ ID NO: 3717 - DNA, 37 bp, Artificial Sequence
  Synthetic oligonucleotide
tggcggcccttctaccgcccgtcaccacctctatgga

SEQ ID NO: 3718 - DNA, 36 bp, Artificial Sequence
  Synthetic oligonucleotide
tacaccaataaccatacaactacatctaatacgtta

SEQ ID NO: 3719 - DNA, 37 bp, Artificial Sequence
  Synthetic oligonucleotide
gagtactcgtgatcttttacacacatctgcctaaaga

SEQ ID NO: 3720 - DNA, 36 bp, Artificial Sequence
  Synthetic oligonucleotide
agcaccggaatgcccgggcccttgtacgcctagtga

SEQ ID NO: 3721 - DNA, 35 bp, Artificial Sequence
  Synthetic oligonucleotide
ttaagtcatctgcactagtacgccctatattaaaa

SEQ ID NO: 3722 - DNA, 37 bp, Artificial Sequence
  Synthetic oligonucleotide
agtctcgcagaaaaaatctatttcccatttgactgga

SEQ ID NO: 3723 - DNA, 36 bp, Artificial Sequence
  Synthetic oligonucleotide
aggaactgcctaccatcgatttttaataccacacga

SEQ ID NO: 3724 - DNA, 36 bp, Artificial Sequence
  Synthetic oligonucleotide
tttcttcttatgagggggaggtgcggttcggaataa

SEQ ID NO: 3725 - DNA, 36 bp, Artificial Sequence
  Synthetic oligonucleotide
gccaggattcggccattttacctatctcgatttaaa

SEQ ID NO: 3726 - DNA, 38 bp, Artificial Sequence
  Synthetic oligonucleotide
cgtgccgaacaactcacacgctacacctttatttttaa

SEQ ID NO: 3727 - DNA, 36 bp, Artificial Sequence
  Synthetic oligonucleotide
agactatcataactccttcacgaaccttccacataa

SEQ ID NO: 3728 - DNA, 37 bp, Artificial Sequence
  Synthetic oligonucleotide
tcaccgaccctcagtacttcccctgcgcatgactaga

SEQ ID NO: 3729 - DNA, 35 bp, Artificial Sequence
  Synthetic oligonucleotide
tctcactactacccactaaaatcggttgatactac

SEQ ID NO: 3730 - DNA, 35 bp, Artificial Sequence
  Synthetic oligonucleotide
acgcacgggtatgcatcattgatggtttccggtac

SEQ ID NO: 3731 - DNA, 38 bp, Artificial Sequence
  Synthetic oligonucleotide
acgttcctgtacgccgcgggcggtattttcacaattga

SEQ ID NO: 3732 - DNA, 38 bp, Artificial Sequence
  Synthetic oligonucleotide
tcgccctatcaactccctgtattttcatccctcaatca

SEQ ID NO: 3733 - DNA, 35 bp, Artificial Sequence
  Synthetic oligonucleotide
cgcctacgatcacttccccgcgcgactgtctcatc

SEQ ID NO: 3734 - DNA, 37 bp, Artificial Sequence
  Synthetic oligonucleotide
cacaacatatctactctatactagctcaattcaccga

SEQ ID NO: 3735 - DNA, 36 bp, Artificial Sequence
  Synthetic oligonucleotide
cattgcgaccttatcccaccacgaattgccactaaa

SEQ ID NO: 3736 - DNA, 35 bp, Artificial Sequence
  Synthetic oligonucleotide
ttactatccagtatcacaccgaccttccaatccga

SEQ ID NO: 3737 - DNA, 37 bp, Artificial Sequence
  Synthetic oligonucleotide
agaacttgatcgtttctggggtttgggaatcatgtga

SEQ ID NO: 3738 - DNA, 35 bp, Artificial Sequence
  Synthetic oligonucleotide
gggcttgcaaacaacttcacgtatgatccgcacct

SEQ ID NO: 3739 - DNA, 35 bp, Artificial Sequence
  Synthetic oligonucleotide
aatcccgtgagggtcgtttcaagtttcaataatcc

SEQ ID NO: 3740 - DNA, 37 bp, Artificial Sequence
  Synthetic oligonucleotide
ggcttacacagccacctatctttggccaatttataga

SEQ ID NO: 3741 - DNA, 36 bp, Artificial Sequence
  Synthetic oligonucleotide
agcgccttaggcttccttctgcggctaaccatcata

SEQ ID NO: 3742 - DNA, 35 bp, Artificial Sequence
  Synthetic oligonucleotide
gaattagctcacttactatttcattttgaccataa

SEQ ID NO: 3743 - DNA, 35 bp, Artificial Sequence
  Synthetic oligonucleotide
ggccttccccttcatccgcctcaacgctggccacc

SEQ ID NO: 3744 - DNA, 36 bp, Artificial Sequence
  Synthetic oligonucleotide
aggcaggcgactacggatcaacatttctatacccta

SEQ ID NO: 3745 - DNA, 36 bp, Artificial Sequence
  Synthetic oligonucleotide
gttagtgcgtattgtaggctgacgaacgctaccgta

SEQ ID NO: 3746 - DNA, 36 bp, Artificial Sequence
  Synthetic oligonucleotide
gcggcccggcgatcctctagtccaaccggtctacta

SEQ ID NO: 3747 - DNA, 38 bp, Artificial Sequence
  Synthetic oligonucleotide
gggggggcacgtacgacattaggtccttaaatcactca

SEQ ID NO: 3748 - DNA, 36 bp, Artificial Sequence
  Synthetic oligonucleotide
taaccgcgtacggactcaagccacccctattaaaca

SEQ ID NO: 3749 - DNA, 35 bp, Artificial Sequence
  Synthetic oligonucleotide
gctatttgttaagtccagtcgcaaatcaccactat

SEQ ID NO: 3750 - DNA, 36 bp, Artificial Sequence
  Synthetic oligonucleotide
ccgggcactcggactttcactctgtcagtttctaca

SEQ ID NO: 3751 - DNA, 36 bp, Artificial Sequence
  Synthetic oligonucleotide
tcgcaatatatatctccgtggtgtaccatcagtcaa

SEQ ID NO: 3752 - DNA, 35 bp, Artificial Sequence
  Synthetic oligonucleotide
ccctctactggcttctacgtcgcacgactgctacc

SEQ ID NO: 3753 - DNA, 34 bp, Artificial Sequence
  Synthetic oligonucleotide
aacctcacatgctggcgatcactagcaaaccacc

SEQ ID NO: 3754 - DNA, 38 bp, Artificial Sequence
  Synthetic oligonucleotide
aaactgccttgaacaagtttcgatatcacattccatga

SEQ ID NO: 3755 - DNA, 35 bp, Artificial Sequence
  Synthetic oligonucleotide
cctcataaccgattaccaacgccatcaaaatatag

SEQ ID NO: 3756 - DNA, 36 bp, Artificial Sequence
  Synthetic oligonucleotide
aacaaggccaaaatacgcatataattctggttgaaa

SEQ ID NO: 3757 - DNA, 35 bp, Artificial Sequence
  Synthetic oligonucleotide
agtgcgaactcttattactgctattaaaactgtcc

SEQ ID NO: 3758 - DNA, 36 bp, Artificial Sequence
  Synthetic oligonucleotide
tcttgctacgtttgttcgcaccaaacttgtcctgca

SEQ ID NO: 3759 - DNA, 34 bp, Artificial Sequence
  Synthetic oligonucleotide
gttctcgcgcgcacatcaattatatcacaaataa

SEQ ID NO: 3760 - DNA, 38 bp, Artificial Sequence
  Synthetic oligonucleotide
atttacgttcgcttcatggacgcggtcataggacctga

SEQ ID NO: 3761 - DNA, 37 bp, Artificial Sequence
  Synthetic oligonucleotide
tcgcaccggccctcaataccatttacacatccacgga

SEQ ID NO: 3762 - DNA, 36 bp, Artificial Sequence
  Synthetic oligonucleotide
ctcgccacgacttaattctcaattcctcacaactga

SEQ ID NO: 3763 - DNA, 36 bp, Artificial Sequence
  Synthetic oligonucleotide
aactgtacggcgcaattttactctcaagtaccaaaa

SEQ ID NO: 3764 - DNA, 36 bp, Artificial Sequence
  Synthetic oligonucleotide
cactgtcaagttttccattccactatacatcaatca

SEQ ID NO: 3765 - DNA, 37 bp, Artificial Sequence
  Synthetic oligonucleotide
ctttcatcataacccggggaatttaccggccgcctca

SEQ ID NO: 3766 - DNA, 38 bp, Artificial Sequence
  Synthetic oligonucleotide
ggtatttgctagatcttcaattacctcgccgtatataa

SEQ ID NO: 3767 - DNA, 35 bp, Artificial Sequence
  Synthetic oligonucleotide
tgcctgcattgctcgtggaggctcattgactttca

SEQ ID NO: 3768 - DNA, 38 bp, Artificial Sequence
  Synthetic oligonucleotide
ctctgtccttgctttctctctcattccgatgactatga

SEQ ID NO: 3769 - DNA, 38 bp, Artificial Sequence
  Synthetic oligonucleotide
gatctccacttcaggcgccattctatacccattaatga

SEQ ID NO: 3770 - DNA, 38 bp, Artificial Sequence
  Synthetic oligonucleotide
tatcaattttattaataccctcattgtgctcctactga

SEQ ID NO: 3771 - DNA, 35 bp, Artificial Sequence
  Synthetic oligonucleotide
gatgcgagaaccactatccatcccacacgccgatt

SEQ ID NO: 3772 - DNA, 36 bp, Artificial Sequence
  Synthetic oligonucleotide
agcactctgtcaggtcgatcattatttcacaacaca

SEQ ID NO: 3773 - DNA, 36 bp, Artificial Sequence
  Synthetic oligonucleotide
gagttcggccctcgttgatcctcgattacaaattaa

SEQ ID NO: 3774 - DNA, 38 bp, Artificial Sequence
  Synthetic oligonucleotide
gggggtacgtccagcttatcatctcataccattattga

SEQ ID NO: 3775 - DNA, 38 bp, Artificial Sequence
  Synthetic oligonucleotide
cgcacgtcacgagcacaccaacactacttcaccactga

SEQ ID NO: 3776 - DNA, 35 bp, Artificial Sequence
  Synthetic oligonucleotide
acatgtcgtccacctatgttgttaccattatttat

SEQ ID NO: 3777 - DNA, 35 bp, Artificial Sequence
  Synthetic oligonucleotide
attcaatcccctcctatggcttgccccccggttct

SEQ ID NO: 3778 - DNA, 36 bp, Artificial Sequence
  Synthetic oligonucleotide
cggtattcgtacgtctgcgcgcaacccattataaca

SEQ ID NO: 3779 - DNA, 38 bp, Artificial Sequence
  Synthetic oligonucleotide
tccatgcagccacgctcagttactactactagtgatga

SEQ ID NO: 3780 - DNA, 35 bp, Artificial Sequence
  Synthetic oligonucleotide
atcacatttccatcgatctccaaggttctcaaact

SEQ ID NO: 3781 - DNA, 35 bp, Artificial Sequence
  Synthetic oligonucleotide
gtgttcctcacactaatcgttctactttcttaact

SEQ ID NO: 3782 - DNA, 36 bp, Artificial Sequence
  Synthetic oligonucleotide
tcacactccatagatctctcggtagacgcagtccga

SEQ ID NO: 3783 - DNA, 36 bp, Artificial Sequence
  Synthetic oligonucleotide
ccattacaacactacctctatatggtcctatccgca

SEQ ID NO: 3784 - DNA, 36 bp, Artificial Sequence
  Synthetic oligonucleotide
cgctatctctacgccaattaagtcgctcctggtaca

SEQ ID NO: 3785 - DNA, 36 bp, Artificial Sequence
  Synthetic oligonucleotide
gcagataccaagtcattactttattatacataacca

SEQ ID NO: 3786 - DNA, 36 bp, Artificial Sequence
  Synthetic oligonucleotide
attcgtactctataaattccaatggcgtacccacaa

SEQ ID NO: 3787 - DNA, 35 bp, Artificial Sequence
  Synthetic oligonucleotide
tcagtacaccattaatcaccatatcacgcattatc

SEQ ID NO: 3788 - DNA, 38 bp, Artificial Sequence
  Synthetic oligonucleotide
aaccgggtacccacaccacccgtaaccatcccaattta

SEQ ID NO: 3789 - DNA, 35 bp, Artificial Sequence
  Synthetic oligonucleotide
aaacggacgcgcgaaactagttggaacattattcc

SEQ ID NO: 3790 - DNA, 35 bp, Artificial Sequence
  Synthetic oligonucleotide
aacaacgaaataggaaatcctctgctgaaccaaat

SEQ ID NO: 3791 - DNA, 35 bp, Artificial Sequence
  Synthetic oligonucleotide
catgccccccgagtttcgtagttattttcctaaac

SEQ ID NO: 3792 - DNA, 35 bp, Artificial Sequence
  Synthetic oligonucleotide
acgcaattcagaacatattcgcaactctttcaaat

SEQ ID NO: 3793 - DNA, 35 bp, Artificial Sequence
  Synthetic oligonucleotide
tttcgaattctccacctgatacccgccacattaaa

SEQ ID NO: 3794 - DNA, 36 bp, Artificial Sequence
  Synthetic oligonucleotide
accctcctattaacccatcaaaagttcgctaccata

SEQ ID NO: 3795 - DNA, 37 bp, Artificial Sequence
  Synthetic oligonucleotide
atactccacaacgaacatccaaactgtttacatcaga

SEQ ID NO: 3796 - DNA, 36 bp, Artificial Sequence
  Synthetic oligonucleotide
gagtacctagccgcaccggtcttaattttcttaaaa

SEQ ID NO: 3797 - DNA, 35 bp, Artificial Sequence
  Synthetic oligonucleotide
aagctgcacggatcttccatgtcccctctattaaa

SEQ ID NO: 3798 - DNA, 37 bp, Artificial Sequence
  Synthetic oligonucleotide
agttctattatggctcctaactgttcttgttttcaga

SEQ ID NO: 3799 - DNA, 36 bp, Artificial Sequence
  Synthetic oligonucleotide
acactcgcctagaagccaccacccatttctcataaa

SEQ ID NO: 3800 - DNA, 37 bp, Artificial Sequence
  Synthetic oligonucleotide
cctccaccatccgaacattaactaattacccgccaga

SEQ ID NO: 3801 - DNA, 35 bp, Artificial Sequence
  Synthetic oligonucleotide
tacttcctatagttacccacatctactaaccaaac

SEQ ID NO: 3802 - DNA, 36 bp, Artificial Sequence
  Synthetic oligonucleotide
gagtactggcacgcgataccctaactgtacatcaca

SEQ ID NO: 3803 - DNA, 35 bp, Artificial Sequence
  Synthetic oligonucleotide
agccagcaaggctagcatcacataattctcatatc

SEQ ID NO: 3804 - DNA, 37 bp, Artificial Sequence
  Synthetic oligonucleotide
atgaatccgcactactaaaacaatttatccttataga

SEQ ID NO: 3805 - DNA, 37 bp, Artificial Sequence
  Synthetic oligonucleotide
tctgtgctggctttagaaggttttctgttttttccta

SEQ ID NO: 3806 - DNA, 35 bp, Artificial Sequence
  Synthetic oligonucleotide
acatagcactgctaggtttatctcattgtttttaa

SEQ ID NO: 3807 - DNA, 38 bp, Artificial Sequence
  Synthetic oligonucleotide
ttctggcaattggcctctcactctctatggttttgtga

SEQ ID NO: 3808 - DNA, 35 bp, Artificial Sequence
  Synthetic oligonucleotide
ttttgatttattctgcttgctgtttgggcttcttt

SEQ ID NO: 3809 - DNA, 38 bp, Artificial Sequence
  Synthetic oligonucleotide
tatattcacaatcgattcttttcacttcctcattttga

SEQ ID NO: 3810 - DNA, 35 bp, Artificial Sequence
  Synthetic oligonucleotide
tgtaggagttgtctctttttcatattttctgtctt

SEQ ID NO: 3811 - DNA, 35 bp, Artificial Sequence
  Synthetic oligonucleotide
taggactggttaatcctccgaaattgtttttctat

SEQ ID NO: 3812 - DNA, 38 bp, Artificial Sequence
  Synthetic oligonucleotide
ttctatcgggggagttcctactctggtttttttcttga

SEQ ID NO: 3813 - DNA, 35 bp, Artificial Sequence
  Synthetic oligonucleotide
gcctgggtggttatttttttccatatcgaaattta

SEQ ID NO: 3814 - DNA, 36 bp, Artificial Sequence
  Synthetic oligonucleotide
ttagttttctcactgtttcccgttgactattctcta

SEQ ID NO: 3815 - DNA, 38 bp, Artificial Sequence
  Synthetic oligonucleotide
ctagtgaccactgcttcttttggttatcttaatcttga

SEQ ID NO: 3816 - DNA, 35 bp, Artificial Sequence
  Synthetic oligonucleotide
gcctgggttgttatttttttccatatcgaaattta

SEQ ID NO: 3817 - DNA, 38 bp, Artificial Sequence
  Synthetic oligonucleotide
tgtatgattttggtttttgttttggtttcacgtggtga

SEQ ID NO: 3818 - DNA, 38 bp, Artificial Sequence
  Synthetic oligonucleotide
gcagtgttatttctcttggtttctttgatttcacttga

SEQ ID NO: 3819 - DNA, 38 bp, Artificial Sequence
  Synthetic oligonucleotide
ttctatcgggggagttcctactcttgtttttttcttga

SEQ ID NO: 3820 - DNA, 38 bp, Artificial Sequence
  Synthetic oligonucleotide
ggcctggttctcgtacatctgtattttggtttttctga

SEQ ID NO: 3821 - DNA, 35 bp, Artificial Sequence
  Synthetic oligonucleotide
gcacccggggtttttatctgagttgtttttcattt

SEQ ID NO: 3822 - DNA, 36 bp, Artificial Sequence
  Synthetic oligonucleotide
tttatccattgtccttggactctcctccgtttagaa

SEQ ID NO: 3823 - DNA, 38 bp, Artificial Sequence
  Synthetic oligonucleotide
ctgcgctggccaatctcatgttttgtttttattaatga

SEQ ID NO: 3824 - DNA, 36 bp, Artificial Sequence
  Synthetic oligonucleotide
tgcttctttaatctgttttctactattttgatataa

SEQ ID NO: 3825 - DNA, 38 bp, Artificial Sequence
  Synthetic oligonucleotide
gatcccgaattgttttcctattaatcgttttcccatga

SEQ ID NO: 3826 - DNA, 38 bp, Artificial Sequence
  Synthetic oligonucleotide
tcccttgggactctttggttattaacatttctctttga

SEQ ID NO: 3827 - DNA, 36 bp, Artificial Sequence
  Synthetic oligonucleotide
tctaactgctggaccctcctgttttttattagtcta

SEQ ID NO: 3828 - DNA, 38 bp, Artificial Sequence
  Synthetic oligonucleotide
gcagtacggaggtttaagttgtttctcctattttttga

SEQ ID NO: 3829 - DNA, 35 bp, Artificial Sequence
  Synthetic oligonucleotide
atgaccgtttcttggaagtttccgattttttttgt

SEQ ID NO: 3830 - DNA, 36 bp, Artificial Sequence
  Synthetic oligonucleotide
taatgcattgttcgcacctggtttttttaatggtta

SEQ ID NO: 3831 - DNA, 38 bp, Artificial Sequence
  Synthetic oligonucleotide
gagcaataattcctgtttctatctctacaaccatttga

SEQ ID NO: 3832 - DNA, 36 bp, Artificial Sequence
  Synthetic oligonucleotide
actgacttaatctaatttgttttccattctcatgaa

SEQ ID NO: 3833 - DNA, 38 bp, Artificial Sequence
  Synthetic oligonucleotide
gtgcacgggcgttttttaatttaagtttcttgttttga

SEQ ID NO: 3834 - DNA, 35 bp, Artificial Sequence
  Synthetic oligonucleotide
ttatactatccaaatctcgtgtctttcctcattat

SEQ ID NO: 3835 - DNA, 36 bp, Artificial Sequence
  Synthetic oligonucleotide
gtcgtaatttgttctttatatctatttcttgttgta

SEQ ID NO: 3836 - DNA, 36 bp, Artificial Sequence
  Synthetic oligonucleotide
ccttggagttgctggtaacctgttgttttttattga

SEQ ID NO: 3837 - DNA, 35 bp, Artificial Sequence
  Synthetic oligonucleotide
acgtgcctgataattatatgtatgtttcttgtttt

SEQ ID NO: 3838 - DNA, 36 bp, Artificial Sequence
  Synthetic oligonucleotide
atctttcacttagtctcggagttttttgtttcctta

SEQ ID NO: 3839 - DNA, 36 bp, Artificial Sequence
  Synthetic oligonucleotide
attcgtttatttttatttcctgattggtttatttca

SEQ ID NO: 3840 - DNA, 35 bp, Artificial Sequence
  Synthetic oligonucleotide
ttcactggtttttttctttctgacctatagattgc

SEQ ID NO: 3841 - DNA, 36 bp, Artificial Sequence
  Synthetic oligonucleotide
ttgctaatttctgggtttgttacgtccttttatata

SEQ ID NO: 3842 - DNA, 36 bp, Artificial Sequence
  Synthetic oligonucleotide
tacttttttgatttttgatcttggcccacgaaataa

SEQ ID NO: 3843 - DNA, 37 bp, Artificial Sequence
  Synthetic oligonucleotide
tctctcttgtcaatagaatttttgtttgtatcttcga

SEQ ID NO: 3844 - DNA, 36 bp, Artificial Sequence
  Synthetic oligonucleotide
tgtgctcactatgtctctccgttgtctgttttttta

SEQ ID NO: 3845 - DNA, 36 bp, Artificial Sequence
  Synthetic oligonucleotide
aatcaagcagggttcaccattgtcgtttttttttta

SEQ ID NO: 3846 - DNA, 38 bp, Artificial Sequence
  Synthetic oligonucleotide
gatgtactgttcgttttgttttgtccttttcatcatga

SEQ ID NO: 3847 - DNA, 36 bp, Artificial Sequence
  Synthetic oligonucleotide
cgcatactgccgcatcgcatttgttttattgttgta

SEQ ID NO: 3848 - DNA, 35 bp, Artificial Sequence
  Synthetic oligonucleotide
ttgtggttgttcatacctgctatcttttttcgttt

SEQ ID NO: 3849 - DNA, 38 bp, Artificial Sequence
  Synthetic oligonucleotide
gagtgatgcggaataaatcgctttgttttgtttcctga

SEQ ID NO: 3850 - DNA, 35 bp, Artificial Sequence
  Synthetic oligonucleotide
ttagtaggtaactttcactgtttttttatcgtttt

SEQ ID NO: 3851 - DNA, 37 bp, Artificial Sequence
  Synthetic oligonucleotide
gggtctctttttctttaactcttttatctaaatttga

SEQ ID NO: 3852 - DNA, 38 bp, Artificial Sequence
  Synthetic oligonucleotide
tgacgtttttttgactggtttttctgaagtggttttga

SEQ ID NO: 3853 - DNA, 35 bp, Artificial Sequence
  Synthetic oligonucleotide
gacgccaccgttttttattttagttgatttagata

SEQ ID NO: 3854 - DNA, 38 bp, Artificial Sequence
  Synthetic oligonucleotide
tcataaatcactctatctttgtttttcagtcttagtga

SEQ ID NO: 3855 - DNA, 35 bp, Artificial Sequence
  Synthetic oligonucleotide
ttacggatgcttttttttgtcctgagattactttt

SEQ ID NO: 3856 - DNA, 35 bp, Artificial Sequence
  Synthetic oligonucleotide
gactgtacgatggcttaattgttttgtattttgtt

SEQ ID NO: 3857 - DNA, 35 bp, Artificial Sequence
  Synthetic oligonucleotide
ttattgtttctaccatgtttgttgcatatgttttt

SEQ ID NO: 3858 - DNA, 38 bp, Artificial Sequence
  Synthetic oligonucleotide
tttttccgttcaactctactttcgatatattatggtga

SEQ ID NO: 3859 - DNA, 37 bp, Artificial Sequence
  Synthetic oligonucleotide
tagtctttccgattgtttttgttatttatatgcctga

SEQ ID NO: 3860 - DNA, 36 bp, Artificial Sequence
  Synthetic oligonucleotide
gcggggcgccctcgatttggttttatttttctcaca

SEQ ID NO: 3861 - DNA, 37 bp, Artificial Sequence
  Synthetic oligonucleotide
tgttacttttttatcttgttctgccatctctaattga

SEQ ID NO: 3862 - DNA, 36 bp, Artificial Sequence
  Synthetic oligonucleotide
tatctatcactaagtttttatatctaaggtccatta

SEQ ID NO: 3863 - DNA, 38 bp, Artificial Sequence
  Synthetic oligonucleotide
ggctttgttcattttcttactctttgtttgtagtttga

SEQ ID NO: 3864 - DNA, 38 bp, Artificial Sequence
  Synthetic oligonucleotide
gccggtttatttaccgagtttttcatcttttcttatga

SEQ ID NO: 3865 - DNA, 37 bp, Artificial Sequence
  Synthetic oligonucleotide
agggtactagcattttcgattttgtgaaattttctga

SEQ ID NO: 3866 - DNA, 38 bp, Artificial Sequence
  Synthetic oligonucleotide
atactgcagtagcacttgtcgtttttctccaatattga

SEQ ID NO: 3867 - DNA, 35 bp, Artificial Sequence
  Synthetic oligonucleotide
ttcgttcctaagaatttgccatttgttttttggtc

SEQ ID NO: 3868 - DNA, 37 bp, Artificial Sequence
  Synthetic oligonucleotide
tcactctatccagcatgcgaggtgttattctatttga

SEQ ID NO: 3869 - DNA, 35 bp, Artificial Sequence
  Synthetic oligonucleotide
agtcgatagaataattttttggttttctcactcat

SEQ ID NO: 3870 - DNA, 35 bp, Artificial Sequence
  Synthetic oligonucleotide
tactgtccttttcaattcgtgtcttggttttatta

SEQ ID NO: 3871 - DNA, 38 bp, Artificial Sequence
  Synthetic oligonucleotide
taaacgtggtactgcgcacggttatttctttctcttga

SEQ ID NO: 3872 - DNA, 38 bp, Artificial Sequence
  Synthetic oligonucleotide
tggggtacttgcctactttttacctggttgttatttga

SEQ ID NO: 3873 - DNA, 38 bp, Artificial Sequence
  Synthetic oligonucleotide
ttggggttaacgttctgatctcgttttcttattattga

SEQ ID NO: 3874 - DNA, 36 bp, Artificial Sequence
  Synthetic oligonucleotide
ggaatgcagcactcgaggttttctttgtttttccca

SEQ ID NO: 3875 - DNA, 38 bp, Artificial Sequence
  Synthetic oligonucleotide
gcgcccaaatccgttgctttgttgttttgtacttttga

SEQ ID NO: 3876 - DNA, 38 bp, Artificial Sequence
  Synthetic oligonucleotide
agtagcctttctctcgatctttgtttgttttttgatga

SEQ ID NO: 3877 - DNA, 38 bp, Artificial Sequence
  Synthetic oligonucleotide
actttcggttgaccatcatatatctctttcttacttga

SEQ ID NO: 3878 - DNA, 35 bp, Artificial Sequence
  Synthetic oligonucleotide
gtcgtaccaatatcggatatcctggtttttctgtc

SEQ ID NO: 3879 - DNA, 38 bp, Artificial Sequence
  Synthetic oligonucleotide
ttactgaacctctccggccctctattttttgaagttga

SEQ ID NO: 3880 - DNA, 35 bp, Artificial Sequence
  Synthetic oligonucleotide
ttttccgtttaattcgatcactttcattgtctcca

SEQ ID NO: 3881 - DNA, 35 bp, Artificial Sequence
  Synthetic oligonucleotide
gcgttgacatgggattctttgtctcttagtctttt

SEQ ID NO: 3882 - DNA, 37 bp, Artificial Sequence
  Synthetic oligonucleotide
agttctattatggctcctaactgttcttgttttccga

SEQ ID NO: 3883 - DNA, 38 bp, Artificial Sequence
  Synthetic oligonucleotide
gctgcactctacacttatggttgtctatcttttactga

SEQ ID NO: 3884 - DNA, 38 bp, Artificial Sequence
  Synthetic oligonucleotide
tgaacgtagcagttttgacatttagtatatctttttga

SEQ ID NO: 3885 - DNA, 35 bp, Artificial Sequence
  Synthetic oligonucleotide
gcggtccgtatgggatttttatttcgttcttgtta

SEQ ID NO: 3886 - DNA, 35 bp, Artificial Sequence
  Synthetic oligonucleotide
ttttaggggtcctgtacattctatccttttatcat

SEQ ID NO: 3887 - DNA, 37 bp, Artificial Sequence
  Synthetic oligonucleotide
ttgtccttccctgttagtctatcatctttcctctgga

SEQ ID NO: 3888 - DNA, 35 bp, Artificial Sequence
  Synthetic oligonucleotide
acgacgccccttttgttgtttttcttggtatcttc

SEQ ID NO: 3889 - DNA, 38 bp, Artificial Sequence
  Synthetic oligonucleotide
gagggccccctatcatattgtttttttatcctccatga

SEQ ID NO: 3890 - DNA, 36 bp, Artificial Sequence
  Synthetic oligonucleotide
tgctgccgtaacactgtttatttctattcttgatta

SEQ ID NO: 3891 - DNA, 37 bp, Artificial Sequence
  Synthetic oligonucleotide
tcgactctggtttgtttttttggtttattacttcgga

SEQ ID NO: 3892 - DNA, 35 bp, Artificial Sequence
  Synthetic oligonucleotide
tgttcaaccggtcccattgttttttgtcgtaatct

SEQ ID NO: 3893 - DNA, 35 bp, Artificial Sequence
  Synthetic oligonucleotide
cacgccttccttttgggttgttgatctcgtttttt

SEQ ID NO: 3894 - DNA, 38 bp, Artificial Sequence
  Synthetic oligonucleotide
aaacgcatttggctcaattgatcttattatttttctga

SEQ ID NO: 3895 - DNA, 36 bp, Artificial Sequence
  Synthetic oligonucleotide
tttaccttgccctggttacgaaatatttgtctctca

SEQ ID NO: 3896 - DNA, 38 bp, Artificial Sequence
  Synthetic oligonucleotide
tataccatcgcttctcatactggggtttatttttttga

SEQ ID NO: 3897 - DNA, 37 bp, Artificial Sequence
  Synthetic oligonucleotide
taaatcgttctcgtaacaccttctatcttttttatga

SEQ ID NO: 3898 - DNA, 35 bp, Artificial Sequence
  Synthetic oligonucleotide
atggatttggccttcactctatgttctcgttttct

SEQ ID NO: 3899 - DNA, 38 bp, Artificial Sequence
  Synthetic oligonucleotide
catcgcatctcgaacgggccttttgttttattatttga

SEQ ID NO: 3900 - DNA, 35 bp, Artificial Sequence
  Synthetic oligonucleotide
gcctttacacatttctgttttgataaagtaattct

SEQ ID NO: 3901 - DNA, 38 bp, Artificial Sequence
  Synthetic oligonucleotide
gtgcgctatctaatgtcaccgtttttttcctcaattga

SEQ ID NO: 3902 - DNA, 37 bp, Artificial Sequence
  Synthetic oligonucleotide
tgtcacgtacctcgtgtttcttttctgttaaacttga

SEQ ID NO: 3903 - DNA, 38 bp, Artificial Sequence
  Synthetic oligonucleotide
aatggaacaaactactttcattttctttctctcattga

SEQ ID NO: 3904 - DNA, 38 bp, Artificial Sequence
  Synthetic oligonucleotide
tttcccaaatctagcttttttcaataatccatatctga

SEQ ID NO: 3905 - DNA, 38 bp, Artificial Sequence
  Synthetic oligonucleotide
ttccatctcaccaatgttggtgactgttgccattttga

SEQ ID NO: 3906 - DNA, 37 bp, Artificial Sequence
  Synthetic oligonucleotide
actcgtgtttttttcgttttgtgcccttcgattctta

SEQ ID NO: 3907 - DNA, 35 bp, Artificial Sequence
  Synthetic oligonucleotide
agtgcccggattagctggctacagtttttttctct

SEQ ID NO: 3908 - DNA, 35 bp, Artificial Sequence
  Synthetic oligonucleotide
aaactccttttttgtatgtcgccatttctttctta

SEQ ID NO: 3909 - DNA, 36 bp, Artificial Sequence
  Synthetic oligonucleotide
tcttggcatgtcctcgttttttgatatctgctttta

SEQ ID NO: 3910 - DNA, 36 bp, Artificial Sequence
  Synthetic oligonucleotide
tgtcgtagtagtgcgcatttgtttaactctctatca

SEQ ID NO: 3911 - DNA, 38 bp, Artificial Sequence
  Synthetic oligonucleotide
tccactgtttacggttttaaattgtttccttgccctga

SEQ ID NO: 3912 - DNA, 38 bp, Artificial Sequence
  Synthetic oligonucleotide
agtccatgcgagctgcatgtactctcggttttttatga

SEQ ID NO: 3913 - DNA, 37 bp, Artificial Sequence
  Synthetic oligonucleotide
gcgtgtttagttaattcgttttttaccaatggggtga

SEQ ID NO: 3914 - DNA, 38 bp, Artificial Sequence
  Synthetic oligonucleotide
agtttcccttccgtttctttctcagtttaactctttga

SEQ ID NO: 3915 - DNA, 38 bp, Artificial Sequence
  Synthetic oligonucleotide
ggtgctccgggcttgtaactttatagttttttccttga

SEQ ID NO: 3916 - DNA, 35 bp, Artificial Sequence
  Synthetic oligonucleotide
gactctttgatctccttgaacgtttttgttatttc

SEQ ID NO: 3917 - DNA, 38 bp, Artificial Sequence
  Synthetic oligonucleotide
tcgtttccaatgatttctcgatttacactccatcttga

SEQ ID NO: 3918 - DNA, 38 bp, Artificial Sequence
  Synthetic oligonucleotide
tttctgtcaacactctcgaacatatatttactccttga

SEQ ID NO: 3919 - DNA, 37 bp, Artificial Sequence
  Synthetic oligonucleotide
acgcggagcggttgtttttttttttgtaatccacaga

SEQ ID NO: 3920 - DNA, 36 bp, Artificial Sequence
  Synthetic oligonucleotide
ttgttaacttttcatctcatctttttcgttacgtga

SEQ ID NO: 3921 - DNA, 38 bp, Artificial Sequence
  Synthetic oligonucleotide
acgttggtgcaaacgttttttgatttctagtattttga

SEQ ID NO: 3922 - DNA, 38 bp, Artificial Sequence
  Synthetic oligonucleotide
tatgccctctaattctgggcttttttttctgttgttga

SEQ ID NO: 3923 - DNA, 38 bp, Artificial Sequence
  Synthetic oligonucleotide
gtttcatcttgttttattagatcttagattttttgtga

SEQ ID NO: 3924 - DNA, 38 bp, Artificial Sequence
  Synthetic oligonucleotide
gcaatgcgatttgtttcgtgtttatcctatctagctga

SEQ ID NO: 3925 - DNA, 38 bp, Artificial Sequence
  Synthetic oligonucleotide
tcgtgcttttctggtagttgaccacactgtttttttga

SEQ ID NO: 3926 - DNA, 38 bp, Artificial Sequence
  Synthetic oligonucleotide
ttccatacgtatatttttttgaaattcgacttttttga

SEQ ID NO: 3927 - DNA, 38 bp, Artificial Sequence
  Synthetic oligonucleotide
acgtttttgacctctagttctgtagcattttgttttga

SEQ ID NO: 3928 - DNA, 38 bp, Artificial Sequence
  Synthetic oligonucleotide
actgaactttttttgtttacgaatccatctattgttga

SEQ ID NO: 3929 - DNA, 38 bp, Artificial Sequence
  Synthetic oligonucleotide
gccgcataggggcaaaattgtttttctctcttacttga

SEQ ID NO: 3930 - DNA, 38 bp, Artificial Sequence
  Synthetic oligonucleotide
accctgggggtttgtaaggctcttttttcgtaatttga

SEQ ID NO: 3931 - DNA, 35 bp, Artificial Sequence
  Synthetic oligonucleotide
agttacataccgtttttcgttacttgaattcaaat

SEQ ID NO: 3932 - DNA, 36 bp, Artificial Sequence
  Synthetic oligonucleotide
acgatcaccacaataatgtctttttttcgttttcta

SEQ ID NO: 3933 - DNA, 36 bp, Artificial Sequence
  Synthetic oligonucleotide
gggactgacatccataatcgggttttttttctagaa

SEQ ID NO: 3934 - DNA, 38 bp, Artificial Sequence
  Synthetic oligonucleotide
atcgggtgcgcccccgaatttttccatgtttttgttga

SEQ ID NO: 3935 - DNA, 37 bp, Artificial Sequence
  Synthetic oligonucleotide
ttttgttacccattttggtccctatcctcactcatga

SEQ ID NO: 3936 - DNA, 36 bp, Artificial Sequence
  Synthetic oligonucleotide
agttggacccgtacgattccctaactttcaacctaa

SEQ ID NO: 3937 - DNA, 36 bp, Artificial Sequence
  Synthetic oligonucleotide
tttctggtctaattatttaaccattctcttgcttta

SEQ ID NO: 3938 - DNA, 38 bp, Artificial Sequence
  Synthetic oligonucleotide
attggcgcctatactgctttgtattgttttcgatttga

SEQ ID NO: 3939 - DNA, 38 bp, Artificial Sequence
  Synthetic oligonucleotide
tcctacaagcaaacggtgaagttgaattttatttttga

SEQ ID NO: 3940 - DNA, 38 bp, Artificial Sequence
  Synthetic oligonucleotide
actgctgactgttttatttgacgataataattttttga

SEQ ID NO: 3941 - DNA, 35 bp, Artificial Sequence
  Synthetic oligonucleotide
tttggtcgtatattctatttttggatgtgaattac

SEQ ID NO: 3942 - DNA, 38 bp, Artificial Sequence
  Synthetic oligonucleotide
tacggtacatggtggagtctcttttgataattttttga

SEQ ID NO: 3943 - DNA, 38 bp, Artificial Sequence
  Synthetic oligonucleotide
ttttgcaatggtgattaatgcggttcgcctgtttttga

SEQ ID NO: 3944 - DNA, 35 bp, Artificial Sequence
  Synthetic oligonucleotide
aggttgcagtccgggatctttattgttaatattta

SEQ ID NO: 3945 - DNA, 36 bp, Artificial Sequence
  Synthetic oligonucleotide
gtttaggctgtcaatggccttttgtttttattttaa

SEQ ID NO: 3946 - DNA, 38 bp, Artificial Sequence
  Synthetic oligonucleotide
aggacttattacattctctgtgttccttatctttatga

SEQ ID NO: 3947 - DNA, 35 bp, Artificial Sequence
  Synthetic oligonucleotide
gctctttcctgtcttgtttatttcgttggttttcc

SEQ ID NO: 3948 - DNA, 35 bp, Artificial Sequence
  Synthetic oligonucleotide
gggttacgtacccgactttttttctggttttctct

SEQ ID NO: 3949 - DNA, 36 bp, Artificial Sequence
  Synthetic oligonucleotide
tcgcaagctaatagctttattttttctgtctttcta

SEQ ID NO: 3950 - DNA, 38 bp, Artificial Sequence
  Synthetic oligonucleotide
ttactatgcatcgtttgaatccgttgtttctccactga

SEQ ID NO: 3951 - DNA, 38 bp, Artificial Sequence
  Synthetic oligonucleotide
tggagtttctgctgctcgacttggtatcctgtttgtga

SEQ ID NO: 3952 - DNA, 38 bp, Artificial Sequence
  Synthetic oligonucleotide
gagtaccgtgtcaacgtttttttttgtattatcaatga

SEQ ID NO: 3953 - DNA, 38 bp, Artificial Sequence
  Synthetic oligonucleotide
tctattaacccgtttacgtgctcacctcgtttttttga

SEQ ID NO: 3954 - DNA, 37 bp, Artificial Sequence
  Synthetic oligonucleotide
gcatgagctcatttgttttatcttgtcgttttttgga

SEQ ID NO: 3955 - DNA, 38 bp, Artificial Sequence
  Synthetic oligonucleotide
ttatctctatactatgttgtttctctatttaccactga

SEQ ID NO: 3956 - DNA, 37 bp, Artificial Sequence
  Synthetic oligonucleotide
tagctcacgacgatttattttctcatttcttatttga

SEQ ID NO: 3957 - DNA, 35 bp, Artificial Sequence
  Synthetic oligonucleotide
ttgcaaggcatccgccttgagttttttttcagttt

SEQ ID NO: 3958 - DNA, 36 bp, Artificial Sequence
  Synthetic oligonucleotide
gcgttgtttcgttatggggtttcttctcacaatgga

SEQ ID NO: 3959 - DNA, 37 bp, Artificial Sequence
  Synthetic oligonucleotide
gcaaatctccttgtttatccatctattcctcttagga

SEQ ID NO: 3960 - DNA, 37 bp, Artificial Sequence
  Synthetic oligonucleotide
gccgtgcttctctttctttttcggttaaatttcttga

SEQ ID NO: 3961 - DNA, 38 bp, Artificial Sequence
  Synthetic oligonucleotide
gtaggcctttgatttctttccttccgtttcttttgtga

SEQ ID NO: 3962 - DNA, 37 bp, Artificial Sequence
  Synthetic oligonucleotide
atctcggtaatctcatcatgggggttgtttattttga

SEQ ID NO: 3963 - DNA, 37 bp, Artificial Sequence
  Synthetic oligonucleotide
gcaggccgttcctcatatttgttgaattggttgttga

SEQ ID NO: 3964 - DNA, 38 bp, Artificial Sequence
  Synthetic oligonucleotide
accgaacttttttcggattcctcggggtttttttttga

SEQ ID NO: 3965 - DNA, 36 bp, Artificial Sequence
  Synthetic oligonucleotide
tggagtactgggcttgtccgtaatttttatgtaaca

SEQ ID NO: 3966 - DNA, 35 bp, Artificial Sequence
  Synthetic oligonucleotide
tccatgtacgtcgatattgacatctttatttttta

SEQ ID NO: 3967 - DNA, 38 bp, Artificial Sequence
  Synthetic oligonucleotide
atgttaggccacgattgttttattgttgatttttttga

SEQ ID NO: 3968 - DNA, 38 bp, Artificial Sequence
  Synthetic oligonucleotide
gcggctcgcattgctttttatttcgtagactatcctga

SEQ ID NO: 3969 - DNA, 38 bp, Artificial Sequence
  Synthetic oligonucleotide
tctacctggatggcgataattttttttgatctttttga

SEQ ID NO: 3970 - DNA, 35 bp, Artificial Sequence
  Synthetic oligonucleotide
gagtgcccattagtaatttttcttccactttattt

SEQ ID NO: 3971 - DNA, 37 bp, Artificial Sequence
  Synthetic oligonucleotide
gagtttccctttttattagtgccttttagttgtttga

SEQ ID NO: 3972 - DNA, 38 bp, Artificial Sequence
  Synthetic oligonucleotide
ccataacacttggaggttctttgtttgttttgttttga

SEQ ID NO: 3973 - DNA, 38 bp, Artificial Sequence
  Synthetic oligonucleotide
ttatttcctctcttaacgttttttactaacctatatga

SEQ ID NO: 3974 - DNA, 37 bp, Artificial Sequence
  Synthetic oligonucleotide
ccgtccgctcctttaatccgttttgtttttctgctga

SEQ ID NO: 3975 - DNA, 35 bp, Artificial Sequence
  Synthetic oligonucleotide
taattggcttttttacttatatttcctcatttgtt

SEQ ID NO: 3976 - DNA, 35 bp, Artificial Sequence
  Synthetic oligonucleotide
tactacaggcctctttcgattttccgggtgttttt

SEQ ID NO: 3977 - DNA, 36 bp, Artificial Sequence
  Synthetic oligonucleotide
gttctgtggttcgttttcttaatgttagtactctca

SEQ ID NO: 3978 - DNA, 37 bp, Artificial Sequence
  Synthetic oligonucleotide
ggctgttttttcttgtatttcggatttaccaatatga

SEQ ID NO: 3979 - DNA, 35 bp, Artificial Sequence
  Synthetic oligonucleotide
gggggactatctactaggctttcgttttttcctct

SEQ ID NO: 3980 - DNA, 35 bp, Artificial Sequence
  Synthetic oligonucleotide
agcaattatgtgcgtttgtttttaatttatgttca

SEQ ID NO: 3981 - DNA, 37 bp, Artificial Sequence
  Synthetic oligonucleotide
ttccacacggtgttgaacatttgttttattgatttga

SEQ ID NO: 3982 - DNA, 36 bp, Artificial Sequence
  Synthetic oligonucleotide
ggtgtcgcttatttttatctttgaattggtcataaa

SEQ ID NO: 3983 - DNA, 36 bp, Artificial Sequence
  Synthetic oligonucleotide
aacttttattgatatacgcatttttttcctgggata

SEQ ID NO: 3984 - DNA, 37 bp, Artificial Sequence
  Synthetic oligonucleotide
catggtcgtttttctgtcctctaaacttactatccga

SEQ ID NO: 3985 - DNA, 38 bp, Artificial Sequence
  Synthetic oligonucleotide
tagtctatggcttggctttccatggtttcctttcttga

SEQ ID NO: 3986 - DNA, 38 bp, Artificial Sequence
  Synthetic oligonucleotide
agcactttcgtcatagtggttattgttgtaaattgtga

SEQ ID NO: 3987 - DNA, 36 bp, Artificial Sequence
  Synthetic oligonucleotide
ttaagcgtacgaccgagtttttatatcatatcttga

SEQ ID NO: 3988 - DNA, 36 bp, Artificial Sequence
  Synthetic oligonucleotide
gctctctctggtataggtttttttttgttatccaca

SEQ ID NO: 3989 - DNA, 36 bp, Artificial Sequence
  Synthetic oligonucleotide
tgcctaggtatatttcgaattttcataggattttca

SEQ ID NO: 3990 - DNA, 37 bp, Artificial Sequence
  Synthetic oligonucleotide
ttcttttttatgatgatccgatcctattttctttcga

SEQ ID NO: 3991 - DNA, 36 bp, Artificial Sequence
  Synthetic oligonucleotide
ttgttttccttgttatgtttaaactgtcaaaatcca

SEQ ID NO: 3992 - DNA, 37 bp, Artificial Sequence
  Synthetic oligonucleotide
tactgcagatattttaagtttctgttaatctttgtga

SEQ ID NO: 3993 - DNA, 35 bp, Artificial Sequence
  Synthetic oligonucleotide
ttctctcaaaatagtttttctttccgcaggatgta

SEQ ID NO: 3994 - DNA, 38 bp, Artificial Sequence
  Synthetic oligonucleotide
ttttagcgtaactggatttttttcacgacgttttctga

SEQ ID NO: 3995 - DNA, 38 bp, Artificial Sequence
  Synthetic oligonucleotide
catgcatggctttctttccatgttctttctatccatga

SEQ ID NO: 3996 - DNA, 36 bp, Artificial Sequence
  Synthetic oligonucleotide
acatgcgaccgttttcttgactttcttcgttattga

SEQ ID NO: 3997 - DNA, 38 bp, Artificial Sequence
  Synthetic oligonucleotide
agctcctgttttccatttcaaatcacgttaatctatga

SEQ ID NO: 3998 - DNA, 38 bp, Artificial Sequence
  Synthetic oligonucleotide
acggcgcctctcctgattttccatcttttctttcctga

SEQ ID NO: 3999 - DNA, 35 bp, Artificial Sequence
  Synthetic oligonucleotide
tcgatatctcttgtttttgttaaattcgtcttcaa

SEQ ID NO: 4000 - DNA, 38 bp, Artificial Sequence
  Synthetic oligonucleotide
ctctgtcccaaatccgtatccattttttcttactctga

SEQ ID NO: 4001 - DNA, 35 bp, Artificial Sequence
  Synthetic oligonucleotide
gtgcttcgctctctgagtttttcatctgtcaattt

SEQ ID NO: 4002 - DNA, 38 bp, Artificial Sequence
  Synthetic oligonucleotide
aagcaacgctgacctttcagactttttttatttgttga

SEQ ID NO: 4003 - DNA, 38 bp, Artificial Sequence
  Synthetic oligonucleotide
actctttctgggggtttttcttcttatagatttcttga

SEQ ID NO: 4004 - DNA, 36 bp, Artificial Sequence
  Synthetic oligonucleotide
ttatggtacactctctattgatgtttttctatctta

SEQ ID NO: 4005 - DNA, 36 bp, Artificial Sequence
  Synthetic oligonucleotide
ccctcaattaattatgcttgtattttgtttctatct

SEQ ID NO: 4006 - DNA, 38 bp, Artificial Sequence
  Synthetic oligonucleotide
ttctcgctgtttgttttcccattatgttacgctattga

SEQ ID NO: 4007 - DNA, 37 bp, Artificial Sequence
  Synthetic oligonucleotide
gaggttttgcgattggattttttggttgttatcttga

SEQ ID NO: 4008 - DNA, 36 bp, Artificial Sequence
  Synthetic oligonucleotide
aacccgtagtagcacaccctgtcgaacccaaataaa

SEQ ID NO: 4009 - DNA, 36 bp, Artificial Sequence
  Synthetic oligonucleotide
aacacttctaggttcgcaaccccttataaccctaaa

SEQ ID NO: 4010 - DNA, 35 bp, Artificial Sequence
  Synthetic oligonucleotide
actccgcaatattccttttaaatttaggttgcaac

SEQ ID NO: 4011 - DNA, 35 bp, Artificial Sequence
  Synthetic oligonucleotide
acttcaacgagcgttgatagctcggattttatcaa

SEQ ID NO: 4012 - DNA, 36 bp, Artificial Sequence
  Synthetic oligonucleotide
tctgcataacaaactcgacacgccctagccccaata

SEQ ID NO: 4013 - DNA, 37 bp, Artificial Sequence
  Synthetic oligonucleotide
gagtacctcatcgcatatcgagcgcactttatacaga

SEQ ID NO: 4014 - DNA, 35 bp, Artificial Sequence
  Synthetic oligonucleotide
accccaataccattgcacctgaggactcaatcaat

SEQ ID NO: 4015 - DNA, 36 bp, Artificial Sequence
  Synthetic oligonucleotide
ttccaccgagttcctttccagccaatatagcatata

SEQ ID NO: 4016 - DNA, 35 bp, Artificial Sequence
  Synthetic oligonucleotide
ctcattcgctaccaaccctgtgatctcttctaaac

SEQ ID NO: 4017 - DNA, 35 bp, Artificial Sequence
  Synthetic oligonucleotide
aactgtcatccgccgactaactcaatctaactaca

SEQ ID NO: 4018 - DNA, 36 bp, Artificial Sequence
  Synthetic oligonucleotide
gagtactggcacgcgataccctaactgtacatcaaa

SEQ ID NO: 4019 - DNA, 37 bp, Artificial Sequence
  Synthetic oligonucleotide
ggctgcacttatctgtaacacatcactattccccaga

SEQ ID NO: 4020 - DNA, 36 bp, Artificial Sequence
  Synthetic oligonucleotide
tatctcaactcttctatatcacatgaccataataaa

SEQ ID NO: 4021 - DNA, 35 bp, Artificial Sequence
  Synthetic oligonucleotide
tgaacacgaaaaaactaagcattaaatcacacacc

SEQ ID NO: 4022 - DNA, 35 bp, Artificial Sequence
  Synthetic oligonucleotide
aattaaccaacaaacccataacgagtccctttatt

SEQ ID NO: 4023 - DNA, 35 bp, Artificial Sequence
  Synthetic oligonucleotide
aatgtaactggcaatttctttctcactgatttctc

SEQ ID NO: 4024 - DNA, 36 bp, Artificial Sequence
  Synthetic oligonucleotide
acaatactgcctccacacttccaccttcttttgtca

SEQ ID NO: 4025 - DNA, 35 bp, Artificial Sequence
  Synthetic oligonucleotide
acactatcaagcgcttcgcatttcctttctccaat

SEQ ID NO: 4026 - DNA, 35 bp, Artificial Sequence
  Synthetic oligonucleotide
acccgtgcggcttaaccttatcttctttatttcat

SEQ ID NO: 4027 - DNA, 35 bp, Artificial Sequence
  Synthetic oligonucleotide
accgctggggctctttccgacaatttcttccattt

SEQ ID NO: 4028 - DNA, 35 bp, Artificial Sequence
  Synthetic oligonucleotide
acgcaaccgtagcaaatttcttagtgttttttttt

SEQ ID NO: 4029 - DNA, 38 bp, Artificial Sequence
  Synthetic oligonucleotide
acgggtcacgccttccactttacttggttttattttga

SEQ ID NO: 4030 - DNA, 36 bp, Artificial Sequence
  Synthetic oligonucleotide
agcagtcattttacttctgttttccttaaaattcta

SEQ ID NO: 4031 - DNA, 38 bp, Artificial Sequence
  Synthetic oligonucleotide
agccagtcacaacttctcgtttcgctctctttttctga

SEQ ID NO: 4032 - DNA, 38 bp, Artificial Sequence
  Synthetic oligonucleotide
agctaccggggtttaccttcctttcttctctcctctga

SEQ ID NO: 4033 - DNA, 38 bp, Artificial Sequence
  Synthetic oligonucleotide
agttggcttgtcatcatttttttgcttatcttctctga

SEQ ID NO: 4034 - DNA, 36 bp, Artificial Sequence
  Synthetic oligonucleotide
atccaaacgatcaccttggtctctctttacttttca

SEQ ID NO: 4035 - DNA, 35 bp, Artificial Sequence
  Synthetic oligonucleotide
atccttatttctatctcatcctcttgtcgccgact

SEQ ID NO: 4036 - DNA, 35 bp, Artificial Sequence
  Synthetic oligonucleotide
atcgaaggtactacgtaaatttctcattctctttt

SEQ ID NO: 4037 - DNA, 35 bp, Artificial Sequence
  Synthetic oligonucleotide
atggtctgtcatggcaccgattacatttctttctc

SEQ ID NO: 4038 - DNA, 35 bp, Artificial Sequence
  Synthetic oligonucleotide
atgtgctcttcgttatttctcttatttctatcttt

SEQ ID NO: 4039 - DNA, 35 bp, Artificial Sequence
  Synthetic oligonucleotide
attacttctgctccattttccttttttcatacatt

SEQ ID NO: 4040 - DNA, 35 bp, Artificial Sequence
  Synthetic oligonucleotide
attcctgcgttgcgtatcttccttcgcttattttc

SEQ ID NO: 4041 - DNA, 37 bp, Artificial Sequence
  Synthetic oligonucleotide
ccccactatttatccgcacatcttttgttctctttga

SEQ ID NO: 4042 - DNA, 35 bp, Artificial Sequence
  Synthetic oligonucleotide
cctccgccttactttcttatttctctttacgaatt

SEQ ID NO: 4043 - DNA, 35 bp, Artificial Sequence
  Synthetic oligonucleotide
cgaggaccgacttttccacttatctttgccctttt

SEQ ID NO: 4044 - DNA, 37 bp, Artificial Sequence
  Synthetic oligonucleotide
ctccatcgaactctatctctttttcttaacaatccga

SEQ ID NO: 4045 - DNA, 36 bp, Artificial Sequence
  Synthetic oligonucleotide
gagtacctcacaattttcccgcgacgccctttttta

SEQ ID NO: 4046 - DNA, 37 bp, Artificial Sequence
  Synthetic oligonucleotide
gatcccgttccttttttaacgctctattttcttttga

SEQ ID NO: 4047 - DNA, 35 bp, Artificial Sequence
  Synthetic oligonucleotide
gcaaatgcctttcattacccattgcttttctgaca

SEQ ID NO: 4048 - DNA, 36 bp, Artificial Sequence
  Synthetic oligonucleotide
gcaatgaacacctacacatacctgcctacacgatta

SEQ ID NO: 4049 - DNA, 36 bp, Artificial Sequence
  Synthetic oligonucleotide
gcaatttttcattcttagggtttctctcacttccca

SEQ ID NO: 4050 - DNA, 38 bp, Artificial Sequence
  Synthetic oligonucleotide
gcacatttcttaacttttctgtttggatttaccaatga

SEQ ID NO: 4051 - DNA, 37 bp, Artificial Sequence
  Synthetic oligonucleotide
gcacggcttacgctcttcttttccgctatctatttga

SEQ ID NO: 4052 - DNA, 36 bp, Artificial Sequence
  Synthetic oligonucleotide
gcagttcgcctccactcactcttttccgatttatca

SEQ ID NO: 4053 - DNA, 35 bp, Artificial Sequence
  Synthetic oligonucleotide
gcatcctcccgtgtcgctcacttttcctttgcttc

SEQ ID NO: 4054 - DNA, 38 bp, Artificial Sequence
  Synthetic oligonucleotide
gccaactttgaatgggctctcatcctatctctctttga

SEQ ID NO: 4055 - DNA, 36 bp, Artificial Sequence
  Synthetic oligonucleotide
gcccgcgctcgcatcctatttcttctttttttgtaa

SEQ ID NO: 4056 - DNA, 35 bp, Artificial Sequence
  Synthetic oligonucleotide
gccctcgtactcttctttggaacttactttcattt

SEQ ID NO: 4057 - DNA, 37 bp, Artificial Sequence
  Synthetic oligonucleotide
gccgcattatttcgttttttcttcactctgcacttga

SEQ ID NO: 4058 - DNA, 38 bp, Artificial Sequence
  Synthetic oligonucleotide
gcctatcttactatatctcgtttactttccttatatga

SEQ ID NO: 4059 - DNA, 37 bp, Artificial Sequence
  Synthetic oligonucleotide
gcctgtacctgtttacttttatcaatcttgtgcttga

SEQ ID NO: 4060 - DNA, 36 bp, Artificial Sequence
  Synthetic oligonucleotide
gccttccgcttggtgttttttttacttttagatcta

SEQ ID NO: 4061 - DNA, 35 bp, Artificial Sequence
  Synthetic oligonucleotide
gcgatggtctaccttcttttaacaaattttcgctc

SEQ ID NO: 4062 - DNA, 38 bp, Artificial Sequence
  Synthetic oligonucleotide
gcgccttacgttaattcacatatccctttaccatctga

SEQ ID NO: 4063 - DNA, 38 bp, Artificial Sequence
  Synthetic oligonucleotide
gcggtctgggaatttctaccctgcttctatctttttga

SEQ ID NO: 4064 - DNA, 35 bp, Artificial Sequence
  Synthetic oligonucleotide
gctacgccttactctctgataatctccactttccg

SEQ ID NO: 4065 - DNA, 35 bp, Artificial Sequence
  Synthetic oligonucleotide
gctatctgagctcccgctttctttcgattatatat

SEQ ID NO: 4066 - DNA, 35 bp, Artificial Sequence
  Synthetic oligonucleotide
ggcccgatttcctatgtcatttggttttttctttc

SEQ ID NO: 4067 - DNA, 35 bp, Artificial Sequence
  Synthetic oligonucleotide
ggccgtcgcatacctagatttctttatcctttttc

SEQ ID NO: 4068 - DNA, 38 bp, Artificial Sequence
  Synthetic oligonucleotide
ggcgccaatttccttctatcgcaattcatttcctctga

SEQ ID NO: 4069 - DNA, 36 bp, Artificial Sequence
  Synthetic oligonucleotide
ggctaggccgccttcttatctttatgcccttgttaa

SEQ ID NO: 4070 - DNA, 35 bp, Artificial Sequence
  Synthetic oligonucleotide
ggcttcttatttgcttgaatatccgcttcctctat

SEQ ID NO: 4071 - DNA, 36 bp, Artificial Sequence
  Synthetic oligonucleotide
gggcacggttttttcttttctggtcgctatccctta

SEQ ID NO: 4072 - DNA, 35 bp, Artificial Sequence
  Synthetic oligonucleotide
ggtaccctgattttttctcgcctattttaatattt

SEQ ID NO: 4073 - DNA, 35 bp, Artificial Sequence
  Synthetic oligonucleotide
ggtccaattacccttttcaacttatcgcaccattt

SEQ ID NO: 4074 - DNA, 36 bp, Artificial Sequence
  Synthetic oligonucleotide
gtttcgtggtatgcgaaccttctattacttatttta

SEQ ID NO: 4075 - DNA, 35 bp, Artificial Sequence
  Synthetic oligonucleotide
gttttcttcccggttaaccctttattttttttggt

SEQ ID NO: 4076 - DNA, 38 bp, Artificial Sequence
  Synthetic oligonucleotide
tacactttctctagttactactcaccttctttctctga

SEQ ID NO: 4077 - DNA, 35 bp, Artificial Sequence
  Synthetic oligonucleotide
tagttacttttaatcaatactctctatttttttgc

SEQ ID NO: 4078 - DNA, 35 bp, Artificial Sequence
  Synthetic oligonucleotide
tatccttcgcattattctttctcatcggtccttta

SEQ ID NO: 4079 - DNA, 35 bp, Artificial Sequence
  Synthetic oligonucleotide
tatctttattgctctgggtgattgcctcttgtttt

SEQ ID NO: 4080 - DNA, 35 bp, Artificial Sequence
  Synthetic oligonucleotide
tatttcccacgctattcatctattctctttacctt

SEQ ID NO: 4081 - DNA, 36 bp, Artificial Sequence
  Synthetic oligonucleotide
tccactggcttggcattgcctccttgatccttctta

SEQ ID NO: 4082 - DNA, 35 bp, Artificial Sequence
  Synthetic oligonucleotide
tccagcacgcaacctcagcttcatctttttctctt

SEQ ID NO: 4083 - DNA, 35 bp, Artificial Sequence
  Synthetic oligonucleotide
tccatttgtactgtgcgcctaattttctactcttt

SEQ ID NO: 4084 - DNA, 35 bp, Artificial Sequence
  Synthetic oligonucleotide
tccgacctggttatttttttgcctttttctattat

SEQ ID NO: 4085 - DNA, 36 bp, Artificial Sequence
  Synthetic oligonucleotide
tcgcgatttcccatgtctctatacttcttacaccca

SEQ ID NO: 4086 - DNA, 35 bp, Artificial Sequence
  Synthetic oligonucleotide
tcgtacgagatgcactctttctacttaagttttct

SEQ ID NO: 4087 - DNA, 37 bp, Artificial Sequence
  Synthetic oligonucleotide
tcgtcattgccttcctttttcatgtttcattttctga

SEQ ID NO: 4088 - DNA, 35 bp, Artificial Sequence
  Synthetic oligonucleotide
tcgtgatctctatttggtttcttccacgcatttct

SEQ ID NO: 4089 - DNA, 36 bp, Artificial Sequence
  Synthetic oligonucleotide
tcgttctatccgtttgtgcatcttccttctttacca

SEQ ID NO: 4090 - DNA, 35 bp, Artificial Sequence
  Synthetic oligonucleotide
tctaggcatctccgcttcctaaatttctttctgta

SEQ ID NO: 4091 - DNA, 35 bp, Artificial Sequence
  Synthetic oligonucleotide
tctgcccgcactactaaatttttatctcttcacta

SEQ ID NO: 4092 - DNA, 36 bp, Artificial Sequence
  Synthetic oligonucleotide
tctttagcatctcatcttttctgccctcacgcctta

SEQ ID NO: 4093 - DNA, 35 bp, Artificial Sequence
  Synthetic oligonucleotide
tgcacgaggattaccttttctttttctcgattctt

SEQ ID NO: 4094 - DNA, 36 bp, Artificial Sequence
  Synthetic oligonucleotide
tgcttatcccgggaatatcctttgctctcttttcca

SEQ ID NO: 4095 - DNA, 38 bp, Artificial Sequence
  Synthetic oligonucleotide
tggctctcacgtctccattttattttctatttttctga

SEQ ID NO: 4096 - DNA, 37 bp, Artificial Sequence
  Synthetic oligonucleotide
tggggcttaaccatctcttctttctcttttaccagga

SEQ ID NO: 4097 - DNA, 36 bp, Artificial Sequence
  Synthetic oligonucleotide
tggtactaacctctatctcatcctaaaatctcttta

SEQ ID NO: 4098 - DNA, 35 bp, Artificial Sequence
  Synthetic oligonucleotide
tgtcgacctttaccttattcatttgaaatcgcttt

SEQ ID NO: 4099 - DNA, 36 bp, Artificial Sequence
  Synthetic oligonucleotide
ttccttgcaatttcctttctttttattcatccggca

SEQ ID NO: 4100 - DNA, 37 bp, Artificial Sequence
  Synthetic oligonucleotide
ttcgacccttttccatactttttctcacgcaaattga

SEQ ID NO: 4101 - DNA, 38 bp, Artificial Sequence
  Synthetic oligonucleotide
ttctcgatcctttgccgcatttctcacttttctgttga

SEQ ID NO: 4102 - DNA, 36 bp, Artificial Sequence
  Synthetic oligonucleotide
ttctcgtagctacaaatcctttaacacttctcttca

SEQ ID NO: 4103 - DNA, 38 bp, Artificial Sequence
  Synthetic oligonucleotide
ttgcgacgcctctactttcaccccactaaaatttctga

SEQ ID NO: 4104 - DNA, 35 bp, Artificial Sequence
  Synthetic oligonucleotide
ttgtacgttcgctttattttgcattccgccttttt

SEQ ID NO: 4105 - DNA, 37 bp, Artificial Sequence
  Synthetic oligonucleotide
tttcctcgctatttctgtctctttgcccttcttggga

SEQ ID NO: 4106 - DNA, 37 bp, Artificial Sequence
  Synthetic oligonucleotide
ttttcaggtacgaccccatacttttttttcattttga

SEQ ID NO: 4107 - DNA, 35 bp, Artificial Sequence
  Synthetic oligonucleotide
aacgccgtacagttgctgatttcacccactctttt

SEQ ID NO: 4108 - DNA, 35 bp, Artificial Sequence
  Synthetic oligonucleotide
actccttctaaaattacacttatatcacccatacc

SEQ ID NO: 4109 - DNA, 35 bp, Artificial Sequence
  Synthetic oligonucleotide
agaaccgtccctgcatttttattggttattttttt

SEQ ID NO: 4110 - DNA, 38 bp, Artificial Sequence
  Synthetic oligonucleotide
cttgcatattgttcttcctgtttgctttttcttcttga

SEQ ID NO: 4111 - DNA, 35 bp, Artificial Sequence
  Synthetic oligonucleotide
gagtaccctattacgctccccccccattatctctt

SEQ ID NO: 4112 - DNA, 38 bp, Artificial Sequence
  Synthetic oligonucleotide
gcaccttctattttcaccccgatttaccctttgcctga

SEQ ID NO: 4113 - DNA, 38 bp, Artificial Sequence
  Synthetic oligonucleotide
gccgccttgggtccattattatctttatatttttctga

SEQ ID NO: 4114 - DNA, 38 bp, Artificial Sequence
  Synthetic oligonucleotide
gccgcttgcctttatttatcatacgctattaatcttga

SEQ ID NO: 4115 - DNA, 35 bp, Artificial Sequence
  Synthetic oligonucleotide
gcctggttatctttgaatagctttcgtattccttt

SEQ ID NO: 4116 - DNA, 36 bp, Artificial Sequence
  Synthetic oligonucleotide
gccttgcatcttcacttatggtgtcttaccacttta

SEQ ID NO: 4117 - DNA, 35 bp, Artificial Sequence
  Synthetic oligonucleotide
gcgaggctattatctctggcgctgttcgcccactt

SEQ ID NO: 4118 - DNA, 37 bp, Artificial Sequence
  Synthetic oligonucleotide
gctagcatgcactcctttacttcttctcatcacacga

SEQ ID NO: 4119 - DNA, 37 bp, Artificial Sequence
  Synthetic oligonucleotide
gttcaacttatcttcctttttctttctgggactggga

SEQ ID NO: 4120 - DNA, 35 bp, Artificial Sequence
  Synthetic oligonucleotide
taccgctccactcttctttattttcggtatctttc

SEQ ID NO: 4121 - DNA, 35 bp, Artificial Sequence
  Synthetic oligonucleotide
tctagccgtcactattcttcgtacgtttccatcct

SEQ ID NO: 4122 - DNA, 38 bp, Artificial Sequence
  Synthetic oligonucleotide
tctcactactcgctctttttccttttctccacttatga

SEQ ID NO: 4123 - DNA, 35 bp, Artificial Sequence
  Synthetic oligonucleotide
tcttacctaatttcttactctgccactttacacgc

SEQ ID NO: 4124 - DNA, 38 bp, Artificial Sequence
  Synthetic oligonucleotide
tggtacgtactcgcgccgcggtctttttcttttcctga

SEQ ID NO: 4125 - DNA, 36 bp, Artificial Sequence
  Synthetic oligonucleotide
ttttacttacccataatttccttacattactttata

SEQ ID NO: 4126 - DNA, 36 bp, Artificial Sequence
  Synthetic oligonucleotide
aaatagctcgcacgagtagccccgatagaaacataa

SEQ ID NO: 4127 - DNA, 37 bp, Artificial Sequence
  Synthetic oligonucleotide
aatcaaatcatacaatagagaccgaaattacaaccga

SEQ ID NO: 4128 - DNA, 36 bp, Artificial Sequence
  Synthetic oligonucleotide
acaggcttggttcaacgaaaatcttcagttccggaa

SEQ ID NO: 4129 - DNA, 35 bp, Artificial Sequence
  Synthetic oligonucleotide
accctggggtgtccgggataaaaatatacaaatca

SEQ ID NO: 4130 - DNA, 36 bp, Artificial Sequence
  Synthetic oligonucleotide
agagaataaaatgggggctagaagctaaaaatataa

SEQ ID NO: 4131 - DNA, 38 bp, Artificial Sequence
  Synthetic oligonucleotide
cgtgcacattctaacggaatcagtaccacacaccatga

SEQ ID NO: 4132 - DNA, 35 bp, Artificial Sequence
  Synthetic oligonucleotide
ctgcttaaaactatcccataatcctaatgaccgga

SEQ ID NO: 4133 - DNA, 36 bp, Artificial Sequence
  Synthetic oligonucleotide
gaatgatttacaccacaattagactactgatatcaa

SEQ ID NO: 4134 - DNA, 37 bp, Artificial Sequence
  Synthetic oligonucleotide
gagttgctgcaagggactccctgaacacttatgacga

SEQ ID NO: 4135 - DNA, 37 bp, Artificial Sequence
  Synthetic oligonucleotide
gcgccgaatagttcgacccgaaaccctaatgaatcga

SEQ ID NO: 4136 - DNA, 38 bp, Artificial Sequence
  Synthetic oligonucleotide
gggctgtgcaaacacaatatataaaaactcaacattga

SEQ ID NO: 4137 - DNA, 35 bp, Artificial Sequence
  Synthetic oligonucleotide
ggtctgcccctgaccgactcaaccgattaagaaca

SEQ ID NO: 4138 - DNA, 35 bp, Artificial Sequence
  Synthetic oligonucleotide
taaaacgaaactaggaaagatacacctaaaaagaa

SEQ ID NO: 4139 - DNA, 35 bp, Artificial Sequence
  Synthetic oligonucleotide
tactaacaacgggtagaccgacgaatacccacaca

SEQ ID NO: 4140 - DNA, 38 bp, Artificial Sequence
  Synthetic oligonucleotide
tactggagggctacaacctgctacatagatacacatga

SEQ ID NO: 4141 - DNA, 37 bp, Artificial Sequence
  Synthetic oligonucleotide
tataacgccctaacatattgactacgagagactggga

SEQ ID NO: 4142 - DNA, 36 bp, Artificial Sequence
  Synthetic oligonucleotide
tcaatatcccgtcctcggggctagttatagtctaaa

SEQ ID NO: 4143 - DNA, 37 bp, Artificial Sequence
  Synthetic oligonucleotide
tcccataataaaccctatcaagtgtagacaaacatga

SEQ ID NO: 4144 - DNA, 37 bp, Artificial Sequence
  Synthetic oligonucleotide
tcgaacccgccacaaaatacttaagtcagtcaacaga

SEQ ID NO: 4145 - DNA, 35 bp, Artificial Sequence
  Synthetic oligonucleotide
tcgcattcccgacaaaatatatactggactacttc

SEQ ID NO: 4146 - DNA, 36 bp, Artificial Sequence
  Synthetic oligonucleotide
tgaaccgttatattaccaaattagagcttagaaata

SEQ ID NO: 4147 - DNA, 38 bp, Artificial Sequence
  Synthetic oligonucleotide
tgacatactataaccggggccattaataatacacatga

SEQ ID NO: 4148 - DNA, 36 bp, Artificial Sequence
  Synthetic oligonucleotide
tgcaacgtaaaacacacaaactctaatgataccgga

SEQ ID NO: 4149 - DNA, 36 bp, Artificial Sequence
  Synthetic oligonucleotide
tgcgacaacagccattcgggaactacccgatcacca

SEQ ID NO: 4150 - DNA, 36 bp, Artificial Sequence
  Synthetic oligonucleotide
ttccggctataatacaaacatatcacccgacttgaa
